United States Patent Application Publication US 2007/0277258 A1 - sequence listing, part 5

SEQ ID NO: 28732 - DNA, 341 bp, Zea mays
  Clone ID: LIB3180-037-P2-M2-C10
tcccaacctgttctgagccagccggccatggcgattagggctggccgctcgccccttctccacctcctcgccctcgccttcctcatcctcgccgcctctccctgcctccaagctcgagtggaccatcgcaaacagatatctcactggactgggcaacccaactttgacctgcagaatgtctcatcgggtcgaaaggatggccctcatctcctgggtagatcaaaggaaataacacacatgaaattaaggagagttgctgtaaggaagaaaatggaagtagtgcagcaggatgatgaagcgttagttaaacttgagaatgcaggtatcgaacgttcaaaagc

SEQ ID NO: 28733 - DNA, 237 bp, Zea mays
  Clone ID: LIB3180-037-P2-M2-C11
tcgagcagaacacacctgcagctgcagaaatagggtcatgtcctgctagctggagagctctggtacggtgtagcaaggtacgggagagagagagagtagcaaactagctagggcacagggcagggcaggggccggctgcattatattgggatcggatctgggggcgaccgagctagcatcagctgagagaagagagagggggcaatatataatggtgttgttgtcaatgaagtcaca

SEQ ID NO: 28734 - DNA, 312 bp, Zea mays
  unsure at all n locations
  Clone ID: LIB3180-037-P2-M2-C12
aaaaaacgagaggagagcggagagacagacaggagccaaatctacgtctcctgccaattcgcctttctccaaccagcttccccgcgccgcccgcccgtcgccgttcctccccgccctctctgcccgcatcagatcgtcttccccacgccgtgtgaccgaggtcccgtgatccctcccacttctgcgccggcgaggacccgggaggcgggatgagcggctgagcacgacgatggcacgcagagccacgccgcaggaggccgncgtngttgccgtggaggccgncatacgatccctaggcctggggttcgacgt

SEQ ID NO: 28735 - DNA, 375 bp, Zea mays
  Clone ID: LIB3180-037-P2-M2-C3
ctttcccttctgtcatctgagactcggaagcctcggccgccgccgttaccacctccttgcgccatggcggagaagtcgccggcagccgacgtggaagccggtctccttgcccacctcaactcagcgggagaggtccccgactcacgctctttcgcttcctccctcggcgtctcccacctcgaacttgagggcgtcatcaagagcctttcagctttccgcatcgtcgacagcacagacatcatcaaggagacatgggtgctcaccgaggaggccaagggctacgccgccaagggctcccccgaggcacagttcgtcgccgcaatttcaccggagggtgcctttaaggacgcacttaaggcaattttgggagatgct

SEQ ID NO: 28736 - DNA, 327 bp, Zea mays
  Clone ID: LIB3180-037-P2-M2-C4
taacgactgcttccttgcctttggggagagcatgaccaggtgctgggacgcaaaccctgaggtccgtcccccattcactgagatcgtgaggatgctggaacaggtggagatggaggttctgaccaccgtccgaaaggctcggttccgctgctgcatcgcccaaccgatgacgctggactgagtcatccacaaaatccaggaaaataacctggagtgccgtttactcctatgtatttataatatatattattagagttgtgcttcagaagcagggagctgacttcttagcctgccttctgtctttgacatgttaccgttgagtacacc

SEQ ID NO: 28737 - DNA, 271 bp, Zea mays
  Clone ID: LIB3180-037-P2-M2-C5
gttgggttccttgatccaaatgccgcagcggtgagggcacccagcccgatcgtccgtctccgtcgatcccccgaagccctaggagagacccttgtccgcgtcgaattcgatcgcgggctgatttgatcccgagaattcgcggggggcaccggcggcggggaatcggatgttgtaggaaaggtcccggatttctgcgcgggcaggcgggcggtcggccatgcatctgaaactgtggaagccgttgtcccactgcgccgtgctgctcgtggac

SEQ ID NO: 28738 - DNA, 402 bp, Zea mays
  Clone ID: LIB3180-037-P2-M2-C6
acccttccgttggaagggggaatccagtaccaccattggagcaccattggcgaccaagatattttccctccttatgctccttgctctttctgcatgtgttgctaacgcgacaattttccctcaatgctcacaagctcctatagcttcccttcttcccccataccttccatcaatgatagcttcagtatgtgaaaacccagctcttcaaccctataggctccaacaagcaatcgcagcaagcaacatacctttatcacccttgtttcaacaatcgccagccctatctttggtgcagtcattggtacaaaccatcagggcacagcagctgcagcaactcgtgctacctgtgatcaaccaagtagctctggcaaacctttctccctactctcagcaacaacaatt

SEQ ID NO: 28739 - DNA, 330 bp, Zea mays
  Clone ID: LIB3180-037-P2-M2-C7
ccgtcatcgatctcgtttcaaatccatccatcctcgtttcctccgtcccgcagcatctcaaccccatggccaagatcaagatcgggatcaatgggttcggcaggatcggaaggctggtggccagggtggccctgcagagtgacgatgtcgagctcgtcgccgagaacgaccccttcatcagcaccgcctacatgacctacatgttcaagtacgacactgtgcacggacaggggaagcaccatgaagtcaaggggaaggactccaaaacccttttttttggtgagaaggaggttgctgagtttggctgcaggaaccctgaggagatcccgt

SEQ ID NO: 28740 - DNA, 306 bp, Zea mays
  Clone ID: LIB3180-037-P2-M2-C8
actgaggatcttgcttgccaatacatatcactttacttgaaactagaaagactggaggaagctaagactctcgcagaaaagctttgtgatggtcctctttcaaatgctgcaaatttgtggagcctgagatttactatggagataaattcaattgcaactgctcctggcagttcttccttgagcaaggagaacctgagctctctgcttgatctatttagcactgtactctccaagttgtctgtaactgaggctgagagactgtggcatatggccatgaggttgttttcccatgataaggtctgtttc

SEQ ID NO: 28741 - DNA, 388 bp, Zea mays
  Clone ID: LIB3180-037-P2-M2-D10
tcgctcgcgaactccatttcgatcccattggaaatcaacccatcctcgtttgctccgtctagcagcctctcaccctcatggccaagatcaagatcgggatcaatgggttcggcaggatcggaaggctggtggccagggtggccctgcagagcgacgacgtcgagctcgtcgccgtgaacgaccccttcatcagcaccgattacatgacctacatgttcaagtatgacactgtgcacggacagtggaagcaccatgaggtcaaggtgaaggactccaagacccttctctttggtgagaaggaggttgctgtgtttggctgcaggaacccttgggagatcccatggggtttccgtggcgctgaatatgttggtgagtctactggtgtttt

SEQ ID NO: 28742 - DNA, 319 bp, Zea mays
  Clone ID: LIB3180-037-P2-M2-D11
cctcaacaggcttgtgtcccaggtcgtgctcatccctgactgcttccctgaggttcgatggtgctctgaacgttgatgtgaacgagttccagaccaacctggtgccctaccctaggatccacttcatgctttcgtcctacgctccagtcatttctgctgagaaggcctaccacgagcagctgtccgtggccgaaatcaccaacagcgccttcgagccatcctccatgatggccaagtgcgacccccgccatggcaagtacatggcatgctgcctcatgtaccggggtgatgtggttcccaaggacgtgaacgctgctgt

SEQ ID NO: 28743 - DNA, 422 bp, Zea mays
  Clone ID: LIB3180-037-P2-M2-D2
gggcccgacggtcatatattccttcatgcaggctgcggggctaacaaatgatcacctagtcagttgcttccggttcgagcattgcagtgccgttccaactctttgcgcatgcgacatcgacagggcaaacacgaaggtggatctgaaaaaagatgaggtgacagcgaagatctatcgcgaggaggtaatcgcaaacccagagatgctgaggacgatcgatgctcttaccgtttcgtagcaccatgtgcatgtgggaatggaagagcaacatggtcgctgaacttgtgtcatctcttatgtggacagtgtgctaggctatcctttgcattgaggtcaggaatcaaaaaaatgcttattatgtaaaaaaattcgtctgttgctaatgcttactctgttgtacattgaatggttgggggaagcta

SEQ ID NO: 28744 - DNA, 340 bp, Zea mays
  Clone ID: LIB3180-037-P2-M2-D3
catttccccatctcccagatccaattcgcgagttcttcctcctctgccgccatggcgctctctgtggagaagacctcgtctggacgggagtacaaggtcaaggatctctcgcaggcggacttcggtcgcctcgagattgagctggccgaggtcgaaatgcccggcctcatggcgtgccgcgccgagttcggcccgtccaagcccttcgccggcgctaggatctcggggtctcttcacatgaccatccagaccgccgtccttatcgagaccctaaccgcgctcggcgccgaggtccgctggtgctcctgcaacatcttttccacgcaggaccacgccgccg

SEQ ID NO: 28745 - DNA, 398 bp, Zea mays
  Clone ID: LIB3180-037-P2-M2-D4
ttcgacaccatgaaggtgctgatcgttgcccttgctctcctggcgctcgctgcgagcgccgcctccagtacaagcggcggctgtggctgccagacaccaccgtttcatctaccgcctccgttctatatgccgcctccgttctatctgccgccgcagcagcagccgcagccatggcaataccccactcaaccaccgcagctaagcccgtgccagcagttcggatcctgcggcgtcggcagcgtcggcagcccgttcctgggccagtgcgtcgagttcctgaggcaccagtgcagcccggcggcgacgccctacggctcgccacagtgccaggcgctgcaacagcagtgctgccaccagatcaggcaggtggagccgctgcaccggtaccaggcgacata

SEQ ID NO: 28746 - DNA, 368 bp, Zea mays
  unsure at all n locations
  Clone ID: LIB3180-037-P2-M2-D5
gatggattcaatcccagaggttcaaaagcgtcatcgcggaattgaatgaagttttggcacatgatgttgttgatgaggcaggggcctggaaaagcaagcttcagcctgaatcaagggagctgtttgagtttttgcccaatactattcaggagcaacttatgcttgaaagggatccccatggcaatgttcaggtcgcaaaaattgaaaccgagaaaatgctcattagcatggtggaaactgaactggagaagagaaaggcagaggggagatactctgcacatttcanagggcaagctcatttctttgggtacgaaggaagatgcggccttcctactaattttgattctaactattgctatgcattaggc

SEQ ID NO: 28747 - DNA, 203 bp, Zea mays
  unsure at all n locations
  Clone ID: LIB3180-037-P2-M2-D6
gcccgaaatccccgtcccccaacccgtccgtccaaaacgcaaccggccgccctttgttttttttttaatggaaggggggaagaacaaaannnnnnnnaaaaaanaaaactcaaaaccaatgcaaacccattaactttaaacaaaaaagcctaaccccccccttaataaaaaaaaaaagctaattaaaaaaaaacgtggacacc

SEQ ID NO: 28748 - DNA, 264 bp, Zea mays
  Clone ID: LIB3180-037-P2-M2-D7
gaggaaatccaccaccgcggccggggcctcccagatctcgctggaggcagcggcagcggcggcggtggggggcgatggcgctcaacatgaagaccctgacgcaggcgctggcgaaggcgtcggctgtcatcgagaagacggtgtccacgacggtgcaggaggtgacgggcccgcgcccgctgcaggactacgagctgctggaccaggccgggtccggcgggccgggactcgcgtggcggatctacactgcgcgaccgcagtatg

SEQ ID NO: 28749 - DNA, 408 bp, Zea mays
  Clone ID: LIB3180-037-P2-M2-D8
cgtcaccacaccaccactccctcactggcctctcactcccgatccctgcgaccactaccgcctcctccgcgtcacccctctcgtcgcctcttgcggcgaccggcggcggatcgtccgcggcgcaagcgcaaccatggggctcttcaccgtgacgaagaaggccaccacccccttcgaaggccagaagcccggtacctccggcctccgcaagaaggttactgtattccagcagcctcattatctgcagaactttgtccagtcaacattcaatgcccttcctgcagaccaagtaaaaggtgcaaccattgttgtctctggtgatggccgctatttctcaaaagatgctgttcagatcataacaaaaatggctgctgccaatggagtaagacgtggttgggttggacaaaa

SEQ ID NO: 28750 - DNA, 375 bp, Zea mays
  Clone ID: LIB3180-037-P2-M2-D9
atttatagtagttacggacatttaaggggcacaagggagcaaccattggcacctaaaatattccacctatttatggtgattggcatatctgaaggtgctggtacggcaaccattattggacaatgctcacaaggtcctatagctacccttattgcatcgaacctatcaccaactgtgtcttcggtatgtgaaaacccaattcttgaaccatacaggattcaacagggaattgaagctggcattttacctttatcactcttgttattgcaacaatgatcagccctattacaggagttacctttggtgcatttattgggacaaaacatcagggcacatcaactacaacaacttgtgctagcaaaccttgctggctac

SEQ ID NO: 28751 - DNA, 176 bp, Zea mays
  Clone ID: LIB3180-037-P2-M2-E1
tggtttcgtaactggtgagggactgagggtctcggagtggattgatttgggattctgttcgaagatttgcggaggggggcaatggcgaccgcggggaaggtgatcaagtgcaaagctgcggtggcatgggaggccgtcaagccactgtctatcgaggaggtggaggttgctcctcc

SEQ ID NO: 28752 - DNA, 387 bp, Zea mays
  Clone ID: LIB3180-037-P2-M2-E10
tcggcgtggtcgaggaggtgggcgccggggtgacgcacctgtccgtgggcgaccgcttggcgctgtagccgggcgttaattgttggcgctgccgcctctttacggattgatgttccaacctgccgttggccttgactttattgctcgtcatgttgttaacaggttcttctttcctctggttgtaatctattcttgcctttattttaaactattcttttaaggttattatttttgtattcatgtctttttctattattttatagttaatttattttggggggctgtatttttttataatttactttttttattataaattttcttatatttcattattttattttttatatttattatctaactatatattattctattcttatttta

SEQ ID NO: 28753 - DNA, 354 bp, Zea mays
  Clone ID: LIB3180-037-P2-M2-E11
gcagcagcgacgattcagtgaggcacccctctcctggcctcttctcgccttctccgtttccgcgaacccagctgcctcgtagccccaccacaccgccgagcacgcggtctcccgcgccgccttccacccaagcgaagctacccctgctcgacccagaattatcttctaccagcgctagtccgctccgcctctctactggctgccgtggagtggggatccgtccggacttccttctttcgctgttgatgtcatcatgctgagcattttgtggtagagacgatcatctctttgggttccagcatataactcatgcccataaaatttgcactagaaaatatgtcgacacaagccttt

SEQ ID NO: 28754 - DNA, 396 bp, Zea mays
  Clone ID: LIB3180-037-P2-M2-E2
ccgaaccccaaaccccaaaccctagcttcgctcgttgcggcgagccggcgatggcgaagtctctgcgatccaaacgcgagaagcggcttcggacgttgcgccgggagatagcggagccgttctacgacaagaaggaggccgccaagctcgccgcgcaggccgtagccctagctgctgccccgctcccggtccgcgggcccccgccgtcccaggatgccggcacctcccgcgcagctagctcggcctcggctatggatgtggagatgtctggtgcagggaacagcaggtttaagacctttctgaggccacttggcagcattaggcagaagaaggtgcagcttcttttgaggatcaaggatggcaagggaaatgcttggaagagggtaagtttttttt

SEQ ID NO: 28755 - DNA, 346 bp, Zea mays
  Clone ID: LIB3180-037-P2-M2-E3
tgacgaagcttaccacacttactgcatggatccaccgcgcagttctgtcccgagaggtaaatggttctgcacgccgtgtagtgcatggaggtcggcgaacgggatgcagaggtatgagaagtcgatcctgcagagcgtcaagcgtgttcttgatgccaaagggcccaaggtgcaggcagcagctgctgctccaggaaaataagcagcggcgctgtggatgtgggggtacaaaaagaaatgaaaggattcttgttcctctgaaggtgtatgcattactctgacagactgaatcgagtaatcggaggatgggctgtttatacctggggagaagacctgttggcttttt

SEQ ID NO: 28756 - DNA, 87 bp, Zea mays
  Clone ID: LIB3180-037-P2-M2-E4
actgtttttaatcttaccacacttactgcattgatccactctcgcagagcggtcgggagagtaaaatgattctgcactccttttatt

SEQ ID NO: 28757 - DNA, 353 bp, Zea mays
  Clone ID: LIB3180-037-P2-M2-E5
cgaatttccgggttggcccaacccttccgttggacctggacccattacgtcgcctgcctcctaattttcctgctgcatttctccccccagttaaatccatccaattctaattcaactagtaattgtgaagtagaagaacagagctgcacagatggcgagcaacagctcatgtggtgaaaatgcgagaaagccacacacaccatccgctattgttattggtggtgggtttgcaggtcttgctgctgctgatgcgctcagaaatgcatccttccaggttattcttctggaatctcgtgatagaattggtggcagagttcacactgactactcttttgggtttccagtcgatttgg

SEQ ID NO: 28758 - DNA, 429 bp, Zea mays
  unsure at all n locations
  Clone ID: LIB3180-037-P2-M2-E6
cgaatttccggggtggcccacacgcgtccgttcgtggccgccggttacctcttccgggcgccgggcttccttcctgcagccgttgccgcctccctccaaaacttgtcgtcgtatccctccaacacccgcatctggcgcagacgaccatacacccgctctgatgctttaaatcaatgtgtatggggttccaagcgtctgacctgacaaagaccgccccaagcaacgatgattcttgaagcgattgcagagataaaattgaagtgattttatagtgatttttttgcggagacagctgatttcccattggatatagtgattttatggtgattttttttgcagagggctgatttccttgatgtgcggctaaacgagtnggagaggggggaaccccgttttttaatttttattttggataataaccgggtatcg

SEQ ID NO: 28759 - DNA, 432 bp, Zea mays
  Clone ID: LIB3180-037-P2-M2-E7
caactcgccgtctgccttctgcgcctccatttcggcctctgtcccttgcaagttcaatctcacctccaaccatgggtaaagagaagtcccacatcaacattgtggttattggccacgttgactctggcaagtcgaccaccacaggacacctgatctacaagcttggaggcattgacaagcgtgtgatcgagaggtttgagaaggaggctgctgaaatgaacaagcggtccttcaagtacgcatgggtgctcgacaagctcaaggctgagcgtgagagaggtatcaccattgatatcgctctgtggaagtttgagaccaccaagtactactgcacggtcattgatgcccctggacaccgggacttcatcaagaacatgatcactggtaccttccaggctgactgtgctgtccttatcattgactccaccactg

SEQ ID NO: 28760 - DNA, 143 bp, Zea mays
  Clone ID: LIB3180-037-P2-M2-E8
cgttggtggtggtggtgtgtgagcagccaggcgtggtgctccctttgtttcctggatggtatgttgctccttgaataataatcgtagtggcgttgcgcccgttgatctcggagccgttctacgacaagaagggggccgccaag

SEQ ID NO: 28761 - DNA, 308 bp, Zea mays
  Clone ID: LIB3180-037-P2-M2-E9
ctccgcaggaaagaagcgaagcaactgtccgccgtctccgtttttctccacaccacccaaagctctctccgaccacagcctcgcccccagcgcctccttccgcagtcatgtaccgcgcggccgctagcctcgcctccaaggcgcggcaagccgggaacagcctcgccgcccgccaggttggaagcaggcttgcctggagcaggaactatgctgcgaaggacatcaagtttggtgttgaggcccgtgctctgatgttgaggggtgttggggagttggcagatgccctcaaagtgacaatgggacctaag

SEQ ID NO: 28762 - DNA, 184 bp, Zea mays
  Clone ID: LIB3180-037-P2-M2-F1
tgatgccctgtttgatagtgacagggagaagtatgcaccctttgaagacattcttcgtgctgctcaggaagcaattgtgctccccccatgggttgcacttgctattaggccaaggcctggtgtctgggattacaattcgggtgaatggaagtgagcctggctgtggaggagcctgagtgtttct

SEQ ID NO: 28763 - DNA, 341 bp, Zea mays
  Clone ID: LIB3180-037-P2-M2-F10
ccaaatcgaatccgtggtgcactgccgctccccctccctcacaagccgccgccgccgtgaggactccggcgaatggcgtcccgcgtcgcctcgggcctcctccgccgccgcgccgtcgccactctagggctactaaggagtcatacacatgtcagaaactacagcagtcaactttcagctttgattccagctacttctcaatgctcaaatctgacaagaagacgctattacttacctaatccatctctgtaccaagtttggagtaggtcatttgcctcagacagcggaaacaagttcgaggcttgtgtgcccttcatgggtgaatctgtaactgatggaac

SEQ ID NO: 28764 - DNA, 320 bp, Zea mays
  Clone ID: LIB3180-037-P2-M2-F12
attcaccatcatggagctttcggtgggacaatcgcacacatatagaagacataatggaaatccctactctgttttccaaccatagtagtggaagcattcggcctgatacaaagagtggttccattgccccgaccgaagggttttctaatggaaatagccttggaactagcccttccaatgtgtctcatggaacaaagtggcacaaatctgacaaaaaaatggaagcatctaaggttacaatggctgatcctcgagctgaccaccccacttgaagtaactcttcccttgaggcaaagcttttcaggaaatcactggacatg

SEQ ID NO: 28765 - DNA, 216 bp, Zea mays
  Clone ID: LIB3180-037-P2-M2-F3
atgcaattatagagacccttgagaacgatgaacagaaggttggggctgaaattgtaaggaagtccttgagctatccacttaaattgattgcaaaaaatgcaggcgttaatggcagtgtggttactgagaaggttcttgccaatgagaacttcaggtatgggtacaatgcggctacaggggagtatgaggacttgatggctgctggtatcattgatc

SEQ ID NO: 28766 - DNA, 217 bp, Zea mays
  Clone ID: LIB3180-037-P2-M2-F4
tctttcttccgtcgggtcttctcgcgcttggcactcccatcgagatccatcagcccccaacctctgtaagcttcccttgacgtcgtcgtcgtcatccatggagagcaaggacggcacccacgatcccgccacgacggccgcgccaccggccggcgcgccgaagcccgcgatgccttccgcggagacggcgcggtggggcacgcggtatatgggcccg

SEQ ID NO: 28767 - DNA, 318 bp, Zea mays
  Clone ID: LIB3180-037-P2-M2-F5
ccttaaccctcctttttttcgctgttggaggagaactacctgctcctgctccctcttccgctcctccgcgctcccgctcgccatccccaggcttcatttcggacggggatggacgactacgcccgggagatgatggagctgaagacgctcgtcacccgcaccctcgagaagaagggcgttctcgccaagattagggctgagctaagagcaagcgtgtttgaagccattgaagaggaggatcgggtgatggagaatgatgatggcggtaatcctgctttgcttggtagcttgaatgaccgggctaagcaactgcatgct

SEQ ID NO: 28768 - DNA, 415 bp, Zea mays
  Clone ID: LIB3180-037-P2-M2-F6
tctactacgactactatgggaaagctgcccctcacatacccgccccgaatttccggggtcgcaccaacccgtccgaccgacccgacccgatccggacctgggccggccagccatggcgactagggtttggctcaccaccctcctcctcgccttcctcctcgtcgccacccccttcaccgcccgagttgctagagctgattcggaggaagatgctgctgcagctgaggttgttgaaggggctgatctaggtattgtgggtgatgatacacaggtttccagtgacggacctttaagccctgctcctggtgtagagacagtagttgtattccccaaaaatgctggcaaaattgtactagcaggtgaagaaactgaattactagttggtctgcaaaatgagggggaatcgactttgaat

SEQ ID NO: 28769 - DNA, 256 bp, Zea mays
  Clone ID: LIB3180-037-P2-M2-F7
tcgagattagtggccaaattgataggccttaattagaggggagttggtttccaaataagtcatttcctaaattagggtttccaaataagtcatttcctaaattagaagttacctagttggtcgggccagtggcctatttatatggaaccaagaggcagtgaaaggaataagaaatacatcagctttacctcccatctccctacactctctctaaagcctacggctgaggattaccttcccggagaagactgacagc

SEQ ID NO: 28770 - DNA, 339 bp, Zea mays
  Clone ID: LIB3180-037-P2-M2-F9
ggcaatcgcagctggcatcttaccttggtcacccttgttcctccaacaatcatcagccctattacagcagttacctttggtgcatttattggcacaaaacatcagggcacaacaactacaacaacttgtgctagcaaaccttgctgcctactctcagcaacagcagtttcttccattcaaccaactagctgcattgaactctgcttcttatttgcaacaacaacaactaccattcagccagctacctgttgcctacccccagcaatttcttccattcaaccaactggcagcattgaactctcctgcttatttacagcagcaacaactactaccattcag

SEQ ID NO: 28771 - DNA, 407 bp, Zea mays
  Clone ID: LIB3180-037-P2-M2-G1
tctccgacctcggcgaagtagctcattgtttgccaaccagggatgaagatggaggcgctatctcctgtgccgcgccagaactcctcgtacatagtcgggtcgccatgatcgaggttgacaaacaatgagctacttctccgacctcggcggcatctgttggttcctggagcctggattcgagcgcgaggtgcggcgtctccaccggctcgtggggaatgccgttgtagacggataccatgtgctcgtcgggacaggctccactcagctctttcaggccgtgctgtacgcgctctcacctgcaactgacggcacacccatgaacgtcgtctcaccggcaccggactactcgtcttacccatctgtgaccaactatctaaactctgcgctctaccggtgggctggtgatg

SEQ ID NO: 28772 - DNA, 330 bp, Zea mays
  Clone ID: LIB3180-037-P2-M2-G10
ggcatcctccgcaagtggatctctcgttttgatgtctggccatacctggagacatacactgaggatgtttccagtgaaataatgaaagaaatgcaggccaagcctgaccttatcattggcaactacagcgatggcaacctagtcgccactctgctcgcgcacaagttgggagtcactcagtgtaccatcgctcatgccttggagaaaaccaaataccccaactcggacatctacttggacaaattcgacagccagtaccacttttcttgccagttcacagtttaccttattgccatgaaccacaccggtttcatcatcaccagcacattc

SEQ ID NO: 28773 - DNA, 340 bp, Zea mays
  Clone ID: LIB3180-037-P2-M2-G11
ccgcagaccgggagtagtcgacgcgccgtcactgaatcctcagatcacggctagccgtaatcacgccactctgctgactcccggcgagcagtgtaacattttccttcagccatgggcaaggagaagactcacatcaacattgtggtcattggacatgtcgactctggcaagtcgaccaccactggccacctgatctacaagctcggcggtattgacaagcgtgtgattgagaggttcgagaaagaggccgcggagatgaacaagcggtcattcaagtatgcctgggtgcttgacaagctcaaggccgagcgtgagagaggtatcacaattgatattgctt

SEQ ID NO: 28774 - DNA, 323 bp, Zea mays
  Clone ID: LIB3180-037-P2-M2-G12
agaaagtggagcacttgttttgagtgacaaaggtgtttgttgcatagatgagtttgataagatgtctgataatgcccgaagcatgttacacgaggtgatggaacagcagacagtatccattgcgaaggctggaataattgcatctttaaacgctaggacatctgtcctggcatgtgccaatcctactgaatcacgttacaatccaaggctctctgtaattgacaacatccacttagcgccaacgctactttcaagattcgacctgatttatcttatcttggacaaggcggatgagcaaactgataggcgcctggcaaagcata

SEQ ID NO: 28775 - DNA, 398 bp, Zea mays
  Clone ID: LIB3180-037-P2-M2-G2
tgggaaacgaaaaagcaaatagctattgggaagcagagctgcctcctaactacgatagggttggaatagagaatttcatccgtgcaaaatatgaggacaagagatgggtaccaaggaatggaacatcaaaatcttcgtccagtgttcgagatgagaagagccaagagtctccggctagtgctaataggagtggacatggtcatagatcttcatttgagcaaaaccgtgcttcgccagctcttccgagcaaagttgcacatgcagcttcaaggatatcctctcaggcatcacctcagcccccgaaggtagaaacaccagttccaaaggtggttttacctcctcagtcacagaaatcccccgccaaagttgatgcaaccaccgctaaagttgagaagcca

SEQ ID NO: 28776 - DNA, 215 bp, Zea mays
  Clone ID: LIB3180-037-P2-M2-G3
taccaaccacgaaccacgcaagcgaacccggccggcgcggggcagcggcgatggcggagatcccggtgatcgacctgcgcctcgccggctcgtcgcccgacgagtcggcgcggctgcgcgacgcgtgcgagcgcctgggctgctttcgggtgaccggccacggcgcgcctgcggggctcctggccgacatgaaggctctcttgcgctcgcttttt

SEQ ID NO: 28777 - DNA, 320 bp, Zea mays
  Clone ID: LIB3180-037-P2-M2-G4
cttcctcggcgtgttcctggcttgcctttgccgcggtaagtgaggttggaaataagcttagaacccgctacgaattccttctcatcttccttcgattccgtgttcttttgcttttttctctctcttgacaaaattatgccccgtccgattgccgagcgacgctgttggtgatagtcgtttcattccccaatctagctctagaagcagtggcatgagggcggggcggccgaagatcggcgaccaagcgaccagcgacgtggtagtgcggctacggacgccggagggcctcgactagtggctctactgccactccgcggtcc

SEQ ID NO: 28778 - DNA, 363 bp, Zea mays
  Clone ID: LIB3180-037-P2-M2-G5
gtttgacagcttctttaagcagctttattcaattcctcttgcatctagcaatgagtatatttacaaggactttttcctgtacatggaatgccatcgatttggtttatttgcaacatctactgcacaaagtaacgaatcaactgccactgagggtgcaatacatggggtgccattgattgagaaaataactttccatcttgtgaggctagaagatggtgtgatcctggatgaaaaggctttctgcaatgattttatcaatctggcacatagtattggtgcttacatgtatgaggacctgctttgcattgtttctttgcgataccaaacaatacatattctacagatacgagattcaggcaacct

SEQ ID NO: 28779 - DNA, 435 bp, Zea mays
  Clone ID: LIB3180-037-P2-M2-G6
aggacacgtggggttagatttagatcgtgagcgtgccagcacattagttgtagtatttatatttcatgcttgggcggtgaacacgaagttactttctgacatgagtatagagatgtaccttttcggttttatgaagattatgtcaaagcataaaaacttgaaaatttgatggagctaaggtggtaatttttgagttacaaaattaaagggacatgcttgttacaacaccagatataaagatttaaagagttgcttaatcctaagttataatagggggcggtggtggattttataatcaattcaaaaaaattgttcctattcatactcttaaatagtttatatgttttttggaatctttttaaaaattgtgttattatattttttattagatatatatgaaatatatatattttttttttttttaataatataaat

SEQ ID NO: 28780 - DNA, 110 bp, Zea mays
  Clone ID: LIB3180-037-P2-M2-G7
aagcaacgtcctttcacggagttgctttttttcgttgatgtatggaaaacgagacattgtagaaatcgaagttcgatctagccttttttgcagtataaaaggttagattg

SEQ ID NO: 28781 - DNA, 387 bp, Zea mays
  Clone ID: LIB3180-037-P2-M2-G8
ctcagcttcaggaaagggaaggaagcatgttcgggcaccaccacggccacggcgggcaccaccaggccccgccgccgcacgagcagacgctgttcaggatcttctgccgcgccgacgaggcgtactgcctcaccgtgcgtcacgacgccgtcgtcctcgcgcccaccaacccccgcgacgagtaccagcactggtacaaggacatgaggcacagcacgaaggtgaaggacgcggagggccagccagcgttcgcgctcatcaacagggccaccggcctcgccatcaagcactcgcttggccagtcccatcccgggaagctggtgccctacaacgcggagtacctggacgagtcggtgctgtggacggagagccacgacgtgggcaagg

SEQ ID NO: 28782 - DNA, 386 bp, Zea mays
  Clone ID: LIB3180-037-P2-M2-G9
gaccattagctttatctactccagagcgcagaagaacccgatcgacaccatgagggtgttgctcgttgccctcgctctcctggctctcgctgcgagcgccacctccacgcatacaagcggcggctgcggctgccagccaccgccgccggttcatctaccgccgccggtgcatctgccacctccggttcacctgccacctccggtgcatctcccaccgccggtccacctgccgccgccggtccacctgccaccgccggtccatgtgccgccgccggttcatctgccgccgccaccatgccactaccctactcaaccgccccggccttagcctcatccccagccacacccatgcccgtgccaacagccggatccaagcccgtgccagc

SEQ ID NO: 28783 - DNA, 203 bp, Zea mays
  Clone ID: LIB3180-037-P2-M2-H11
gtcccctccccacctcccgttctgtgcctccttggatagggttagagactgagctcccccgcacgcgcgcgagccatggtctccttcacctgttcccaggtcggcgcgacggcagcgggcggagcctcgcccttcctcggctaccggtggcggagcggccccgggggagccaccccgtcgagctccctcttcgttggccggcg

SEQ ID NO: 28784 - DNA, 316 bp, Zea mays
  Clone ID: LIB3180-037-P2-M2-H12
tagaaagtggaatacagtagcaacaatagagcaacaatggcggccaagatattttccatccttatgctccttgctctttctgcatgtgttgctaacgcgaccatttttcctcaatactcacaagctcctatagctgcccttcttcccccataccttccatcaatgaccgcttcagtatgtgaaaacccagcccttcaaccctacaggctccaacaagcaatcgcaacaagcaacttacctttatcacccctgttctttcaacaatcgccagccctatctttggtgcagtcattggtacaaaccatcaaggcacaac

SEQ ID NO: 28785 - DNA, 171 bp, Zea mays
  Clone ID: LIB3180-037-P2-M2-H2
gcgacgattcagtgaggcacccctctgggggcctcttctcgccttctccggttccgcgaacccagctgcctcgtagccccaccacaccgccgagcacgcggtctcccgcgccgcctttcacccaagcgaagctacccctgctcgacccagaattatcttctaccagcgcta

SEQ ID NO: 28786 - DNA, 380 bp, Zea mays
  Clone ID: LIB3180-037-P2-M2-H4
cggacgcgtgggctcatccctgaccccggtaccgcagcgtaaaccctagtccccggcggcgaccttgcggcctccgctgcgctctgactggtgcgcgcttagacgaggagctgcggcggccaagaccaatcgaccatggctacccgtatccagtttgagaacaactgtgaaattggtgttttctccaagctgacaaatgcttactgtctggtagcgattggagggtcagagaacttctacagtgcctttgaggctgagcttgcagatgccatccctgtggtcaagacctctattgggggcactagaataataggccgactttgtgtggaaacaagaatggactttaattgcacatactacaaccgaccatgagctttagc

SEQ ID NO: 28787 - DNA, 304 bp, Zea mays
  Clone ID: LIB3180-037-P2-M2-H5
cagcggaaaacttgacatcttattggcgcagggcaaggagtatgtctttgttgcaaactcagacaacttgggtgctatagtcgacatcaagatcctaaaccatctgatcaataaccagaacgagtactgcatggaggttactccaaagacgctggctgacgttaagggtggcactctcatctcttacgaaggaagagttcagcttttggagattgcccaagtatccgatgagcatgtgaatgaatttaaatcaatcgagaagtttaagatattcaacactaacaacttgggggtgaaccttaaa

SEQ ID NO: 28788 - DNA, 89 bp, Zea mays
  Clone ID: LIB3180-037-P2-M2-H6
cacagagctcgaccccccctcccttgggttcgttcgtccagccctgaccacccgcatccccgtcagtcatggcagcggcagcaggcgga

SEQ ID NO: 28789 - DNA, 261 bp, Zea mays
  Clone ID: LIB3180-037-P2-M2-H7
cacaggcaccactccccccctgcaggctcctccctctctcggctctggggtcttgcattactctgtcagcccagaggcagagcaagtaagcaaatggttgctatggcggcgccagggcgagtggcgctcctggccgccgcactcctgttcggcgccttcttcccatccgcgttcgccacgtcctcgtaccccgcaaggcttgcgggcaggctcctgtccaccacagagtcggcggtggccaagcagctgtggacgctcaaa

SEQ ID NO: 28790 - DNA, 309 bp, Zea mays
  Clone ID: LIB3180-037-P2-M2-H8
caacatagaaagtggaatccagtagcagcaatagagcaacaatggcgaccaagatattttccctccttatgctccttgctctttctgcatgtgttgctaacgcgacaattttccctcaatgctcacaagctcctatagcttcccttcttcccccataccttccatcaatgatagcttcagtatgtgaaaacccagctcttcaaccctataggctccaacaagcaatcgcagcaagcaacatacctttatcacccttgtttcaacaatcgccagccctatctttggtgcagtcattggtacaaaccatca

SEQ ID NO: 28791 - DNA, 358 bp, Zea mays
  Clone ID: LIB3180-037-P2-M2-H9
cggtaatcccccctcccgagtccaggcgctaaacctaaacctgtcacccggcgccgccgccgccgccgccaccgccgccgccccgaggccccatcccagcgaaaccgacttccgcctcggattgaagcaatgtcgtcggacgacgaggtcagggaggagaaggagctcgacctctcctccaacgatgtcgtcaccaagtacaagactgccgccgaaatcctgaacaacgctctgaagctggttgtgtctgagtgcaagccaaaagcaaagattgttgacctttgtgagaagggtgactctttcataagagagcaaactgggaatggctacaagaatgcaaagagggaagatgaaaggg

SEQ ID NO: 28792 - DNA, 395 bp, Zea mays
  Clone ID: LIB3180-038-P2-M2-A10
ctcgtaagcttacacagttaggtctcaggaatgtcacaaggagaaaaaaggttgcaggtgaatctctttcaactggagatcggactatagaacaacaagacgactcgcttgatgatctgaaccccatgctaggcgaacagaaccatggctccaaggctaaaagctccaggcccagaaggaaaaaattacacactgcaagtgatgaccatgatgacacaagtcagagaaaatcatctgatgaagacacattacaagtacttaaaagcagatcaaaaagtaagaaagttccattggtggatagttcattgagtggatcacagcatcaagaagctcagcatgacccaaactttgatgatgcgaccataggatccatgattagaagtagaaaaaagaag

SEQ ID NO: 28793 - DNA, 129 bp, Zea mays
  Clone ID: LIB3180-038-P2-M2-A11
gttggggcttgggcatttatagcgaagttctgtcaggaaaggagaattcactctatatagtttggatttgaggatttacactgtaattttattcgcagctgagtgttcgagaaaaagaaattgcactgt

SEQ ID NO: 28794 - DNA, 340 bp, Zea mays
  unsure at all n locations
  Clone ID: LIB3180-038-P2-M2-A2
acccacgcgttcagaagggtctgagagattcccccttcgtgaccaagagcctgagactatagatcatctacttgtagggtgtgtctttgagaggaacttctggtttatgctgcttggacaggtcaacctccaaagttttactcctcaggttggagaagaaaatgtcatgcagtggtggaaaagctgcagtgaccagctgcaacagattgctagaaaaggtttcaactctttaattatcctggggctttggacaatttggaaccacagaaatagatgcgtatttgatggtctttctcctaacttggaaacagccatcanaagagcggatgaagaaagagaa

SEQ ID NO: 28795 - DNA, 383 bp, Zea mays
  Clone ID: LIB3180-038-P2-M2-A3
aaatccgcccgcctgccgcagcccccattctcgcgccccgccttcttcctccagcagccccgctcgttcttccggcctcgcgttccgtctccgaagccgcaggcagccatggaaatcaacgaggaggcaatggcggcgcataagcgcgccttcctcgacttcctcgaccaagacgtcgggaagggggtttacatgcaggccgtccgcgacatggtccagaacaagcgccaccgcctcatcatcggcatggacgacctccggaatcacaatctcgatctcgcccgcagggtgatccggacccccggggagtatatgcagccggcgtcggacgcggtgtccgaggtggcgaggaacctggatcccaagtttttgaaggaagggga

SEQ ID NO: 28796 - DNA, 401 bp, Zea mays
  Clone ID: LIB3180-038-P2-M2-A4
aatttttgagttgaccaaggattttgagatgggggtttacaacaagacccctcagtttcttaacatgaaccctcttctgaaggttcctgttctgtagactcctgatggccctcattttgcaagtaatgctatctcacactatgttgctctcttgaaggatgacaaccctttttttgggtcttcccatattgaacaagcccacgttgagcaatggtttgattttgccctaacagaagttgatcctggtgctgcatcgtacttgtatccaaggcttgcgtacctgccttatcttagcacaactgaggaaacagctattttttcattgaagaggtcgcttggtgctctgaacacacaccttgcctcaaacacataccttgttgggcatgctgttactctagctg

SEQ ID NO: 28797 - DNA, 423 bp, Zea mays
  unsure at all n locations
  Clone ID: LIB3180-038-P2-M2-A5
ttcgcgaactccatttcgatcccatttgaaatcaacccatcctcgtttcctccgtctagcagcctctcaccctcatggccaagatcaagatcgggatcaatgggttcggcaggatcggaaggctggtggccagggtggccctgcagagcgacgacgtcgagctcgtcgccgtgaacgaccccttcatcagcaccgattacatgacctacatgttcaagtatgacactgtgcacggacagtggaagcaccatgaggtcaaggtgaaggactccaagacccttctctttggtgagaaggaggttgctgtgtttggctgcaggaaccctgaggagatcccatggggttccgttggcgctgaatatgtngttgagtctactggtgttttcactgaccaagagaaggctgcagctcacttgaagggtg

SEQ ID NO: 28798 - DNA, 420 bp, Zea mays
  Clone ID: LIB3180-038-P2-M2-A6
gtcctctgttacttctccctccgccgccgctcccctcccattcaccgccaccgccaattccataccgtgctccgccacctctgctgagagcgagaagagatggcaggcaagggtgatgggccggcaatcggcatcgatctcggcacgacgtactcttgcgtcggcgtctggcagcacgaccgtgtcgagatcatcgccaacgaccagggtaaccgcaccacaccctcgtacgtcgccttcaccgactccgagcgcctcatcggagatgcggccaagaaccaggtcgccatgaaccccatcaacaccgtctttgatgccaagcgtctcattggcaggaggtttagtgactcctctgtccagagtgatattaagctggggcccttcaaggtcattcctgggcccggtgagaagccaatgata

SEQ ID NO: 28799 - DNA, 298 bp, Zea mays
  Clone ID: LIB3180-038-P2-M2-A7
gagggttcttatgtctatgacaacaatgggaagaagtatattgatgctcttgcaggactgtggtgcacagctttaggtggtaatgagcctcgactagtcaaagcggcaactgagcaattaaacaaattaccgttctaccattccttttggaaccgtacaaccaaaccctcattggatctcgcaaatgatattctcagcatgttcaccgcaagggaaatgggaaaggtgttcttcacaaatagtggttcagaagcaaatgactcacaggttaaactagtgtggtattataataatgcac

SEQ ID NO: 28800 - DNA, 328 bp, Zea mays
  Clone ID: LIB3180-038-P2-M2-A8
tcgctgaggagtgaggaaccctaagcggggcactgtgcaggcgacggcggcgcgctaccggcgacggccgacgggggatacggcgacatcgtccccctcgacccctcctccatccccgacgcggcggcgccagcctgcaggtgctggactagagtcgaatgctaggcggatgctagctgctaggtgttgaatgctgatttgttgtggcctgttacgtcttcaccagttcatatattaaacttgaagaaccacgtggttgaagaaaagcccactgaaaatgagtaatacatcatcttcgtcaagtgggatgggatatatgctgatattc

SEQ ID NO: 28801 - DNA, 287 bp, Zea mays
  Clone ID: LIB3180-038-P2-M2-A9
cgtaaccaagcgaacccatccatggcctccgctgctgccgtcgtctccctcaacgtcggcggcgagatcttccagatcaccaccgccacactttcccgcgccggcgcctcctccccgcttgcctccctcggtccctcctccccgtctgctccgcacttcctcgacggcgacccgcgcctctttgcccaactcctatccttcctccgccatggccgcctccttgctccgtcctatccctcagccacgctcctcgctgaggcgcgccacttcgcgctcgatggcgccct

SEQ ID NO: 28802 - DNA, 322 bp, Zea mays
  Clone ID: LIB3180-038-P2-M2-B1
cgcccgcccgcccctcccctttctttgtctcgccgcccggggagaaggagggctccgccgctcccggggaagagcgcgccattgccgccgccgcgctgactggggaagatggttgtccaggagttcacagttgatctcaacaagccccttgttttccaggttggccatcttgaggaacggtaccaggaatgggttcaccaaccgatcgtcagcaaggagggtccacgctttttcggaaatgatgtcctggagttcttgactcgcacgaagtggtgggctgtgccaactatatggctgcctgttgtctgctgcctgctcgtga

SEQ ID NO: 28803 - DNA, 400 bp, Zea mays
  Clone ID: LIB3180-038-P2-M2-B10
cccgtatctataccaccgaaggcgaggagggggggccaaggacgagcgccttttcgtgcccgctggccattgccactgctcacgagcctcccgcctcgcgctgccctgccctctgcggctctgccccaacgagccccaggagagccagccagccagttaaaggagccgtcaaaagcccccgccgaggagagcacgcaaggtcagacatggcgtcaaccgttaccttcagcccagttagcacccaagctgggttgatccataagccaaggaaccttggagccacaagctacgctggcttaaaggtgccgagctttggctatgagtcatcattcttgggtaggaacgcatcccttcgggcggctgttactacaaggattgggcccaaggcaaagtctggatc

SEQ ID NO: 28804 - DNA, 370 bp, Zea mays
  Clone ID: LIB3180-038-P2-M2-B11
tcgccccttacttcgccggctcattcggcggcgacgagcaccagaaatcctagctgctttgagtatggaggcgctgtttgggtgcaacaaacatggcggggacaaggccgctgatttggcctcgtttataatcgtgcaggctgccttggaggtgccaaggttacttgggctccttgccatgattcttcataatgaaatctttacatctggtggagatcagaatttgattaataggattctgagcaaaaacaaaaatgcaactgatttcgagaacaaggatgatggagagtctgatgatgataatgatgaggagggagacgatgaggatgctgaaaaccaagaagatgatggtggtgatgagggatcagat

SEQ ID NO: 28805 - DNA, 415 bp, Zea mays
  Clone ID: LIB3180-038-P2-M2-B12
gcctcctctacctgtccggctgtcccggctccagcatttccaccctcgcgcggcggtcgccggagcgagcagagctgccggaaggcccgtcggatccgccgccgccaagatgaatgacgccgatgtagccaagcagatccagcagatggtgcggttcatccgccaggaggccgacgagaaggccaacgagatctccgtctccgccgaggaggaattcaacattgagaagctgcagcttgttgaagctgagaaaaagaagattagacaagagtatgaacgcaaagagaagcaggttgaagtacggaagaaaattgagtactctatgcagttgaatgcttctcgcatcaaagttcttcaagcttcaggtgatcttagaaacaaaatggaagacgatgcgatgaaggaactccttctt

SEQ ID NO: 28806 - DNA, 301 bp, Zea mays
  Clone ID: LIB3180-038-P2-M2-B2
gccgaacactttcctctctttcagtttcgcttcgcagacttcgcttgcgcttcacccaaccttaaccgcaacggttcccatgcggagtttttatgaatgaattgaatgaatacgaattcagagccgagtgccgttgattggccgctactagtactacagctaggccactgctcctctgctacccgctaacctcgcgccggagtcgtcgcccacgatggcctaccgatccgcagtgctcttgcccgccctcctactggccgtcgccgtcgatgaggccttcgccgccgccgcagatgggagg

SEQ ID NO: 28807 - DNA, 339 bp, Zea mays
  Clone ID: LIB3180-038-P2-M2-B4
gtccccattcggtcccccccctctgctctctcgaagcctccaggctccagaacccccaccccctctcctctcgcgccgcgaggggttgatccgtccggcgatctgggccctccggccggcgcccgcgcctgggaggcttttccttacccgccgcacgggcggagatgctctcgctccaacagcagcacggcggcgctgtcgccgccggcggcgatgcgcgccaccacgcaccgtagccgtcggtgctcggtggaggcgcggactggctagtgttcgggggccgcgccgacctggaggagcccgcgaggaatgccctgtcgcccgtcttgttcttttttc

SEQ ID NO: 28808 - DNA, 358 bp, Zea mays
  Clone ID: LIB3180-038-P2-M2-B6
ttcgttatttacatcgctgccaccctcctctccgccgtcgccgccgccgccggggatggggggagcgcaattccccggcgacaacgacgtcgcggaagtagacgcggcccgcgacggagaggtggaccgccgtgacgtgggcaagatgaagcacgggtgcgagcattaccggcggaggtgcaagatcgtggcaccgtgctgcaaccaggtgttcccctgccgccactgccacaacgaggctacggcttccggagatcggcatacaatatgtcgtcaggatgttgaaaaagtagtttgcctactctgtgaaacaaaacagccagtgtcacaagtgtgcataagctgtggagtcaatatg

SEQ ID NO: 28809 - DNA, 333 bp, Zea mays
  Clone ID: LIB3180-038-P2-M2-B7
gttagacaattttatcaacagaattaaaatgtgggttggttaaagaagttataaataatttcataagctttccagattgttaaagagtgcattcatatgatttatgaaactccagttatgtttgttttactgtggctgttgctgtttgcctgacaaaaatgagcgggtctgttcactggtgagtttcttctagtaaatggccgaattggctcttccaactatggagacttttgtagagggataaaagttcttactgtcagcagaatttcataatttttggttcagtagtttgggagatttcgaattttgaagttaactaggctgttggctaaa

SEQ ID NO: 28810 - DNA, 297 bp, Zea mays
  Clone ID: LIB3180-038-P2-M2-B9
tcgccgatcgatcgccacagccaacaccaggggccgaggcgacgcgacagcggccaggaggaaggaataaactcactgccagccagtgaagggggagaagtgtactgctccgtcgaccagtgcgcgcaccgcccggcagggctgctcatctcgtcgacgaccagtggattaatcggcatggcggctctggccacgtcgcagctcgtcgcaacgcccgccggcctgggcgtcccggacgcgtccacgttccgccgcggcgcctctcagtgcctgaggggggcccgggctttatttttc

SEQ ID NO: 28811 - DNA, 378 bp, Zea mays
  Clone ID: LIB3180-038-P2-M2-C10
cgaagccgcactgtgagagagggacgcggcctgttgtcccggcttttagacgcaacttccatcgctgcgaagctatccattcgtgttcgtcatggccgccagcgtcaccgtggaaaacctcaaccccaaggtcttaaaatgtgagtatgcagtccgtggggagattgtcatccatgctcagcgcctgcagcaacaactacaaacacaaccagggtctcttccttttgatgagatcctctattgcaatattgggaatccccaatctcttggtcagcaacctgtgacattcttcagggaggttcttgctctttgtgatcatccgtgcctcttggaaaaagaggaaaccaaatcatttgtcaatgctgatggcaattctcg

SEQ ID NO: 28812 - DNA, 390 bp, Zea mays
  Clone ID: LIB3180-038-P2-M2-C11
cgaggaagatgaaatggatcttgattctgaagatgaagacgaggagctgaatgttccagtagtcaaggaaaatggcaaagctgatgagaagaaacagaaaagtcaagaaaaggcagttgctgcaccttcaaaatcaagtccggattccaagaagagcaaggatgacgacgattctgatgaggacgagactgatgattctgatgaggatgagacggacgattctgatgagggtttgtctcctgaagaaggcgatgatgattcaagtgatgaagatgataccagtgacgatgaggaggaagacactccaactcctaagaagcctgaggtaggcaagaagagagctgctgaaagttccgtgctgaaaactcctctatctgataagaaagcaaa

SEQ ID NO: 28813 - DNA, 374 bp, Zea mays
  Clone ID: LIB3180-038-P2-M2-C12
ccgcctttcccgtgtcgtgtcccccgcagcaatcaccgcgagggtttcttccaatcccgttcgttccgttccagttccagcatggcggagcagccgcaggaaggcggcgcgagccccaagcacgagtccctgatggagaagctcgccgacaagctccacgtcggcggcggcaagggcgactcctcgtcctcggactccgacagagacgagccgccccacccctcggtgccgcccaccgacgaggtcaagcagccctcattctccgactccgccgccacggcggccgccgaggccaaggccaaggtgttccgccttttcggccgtgagcagcccatccacaaggcgcttggtggaggcaagcctgctgatgtgtt

SEQ ID NO: 28814 - DNA, 370 bp, Zea mays
  Clone ID: LIB3180-038-P2-M2-C2
agaccattagctttatctactccagagcgcagaagaacccgatcgacaccatgagggtgttgctcgttgccctcgctctcctggctctcgctgcgagcgccacctccacgcatacaagcggcggctgcggctgccagccaccgccgccggttcatctaccgccgccggtgcatctgccacctccggttcacctgccacctccggtgcatctcccaccgccggtccaccatgccactaccctactcaaccgccccggcctcagcctcatccccagccacacccatgcccgtgccaacagccgcatccaagcccgtgccagctgcagggaacctgcggcgttggcagcaccccgatcctgggccagggcgtc

SEQ ID NO: 28815 - DNA, 427 bp, Zea mays
  Clone ID: LIB3180-038-P2-M2-C3
tcgcatttatctaactccaaaaaccatgaagctggtgcttgcggttcttgctttcattgctttagtatcaagtgtttcttgtacacagacaggcggctgcagctgtggtcaacaacaaagccgtgagcagcaacatcatccacaacaacatcatccacaaaaacaacaacatcaaccaccaccacaacatcaccagcagcagcaacaccaacaacaacaagttcacatgcaaccacaaaaacatcagcaacaacaagaagttcatgttcaacaacaacaacaacaaccgcagcaccaacaacaacaacaacaacaaccgcagcaccaacaacaacaacaacaacagcaccaacaacaacatcaatgtgaaggccaacaacaacatcaccaacaatcacaaggccatgtgcaacaacacgaacagagc

SEQ ID NO: 28816 - DNA, 278 bp, Zea mays
  Clone ID: LIB3180-038-P2-M2-C4
tgcaggacttgaagagcgggtacctgaccctctcgtcgccgcggtcgatgttcactgcccagcttatcggcatcgcgctcgggtgcgtcatagctccgctcacgctgtggctcttctggacagccttcgacatcggcgaccctgacggggagtacaaggccccctttgccatcatgttccgggagatggccattctcgggatggagggctttttcgcgctgccactgcactgtcttgacatctgctatgccgccttcttactcgccttggccaccagt

SEQ ID NO: 28817 - DNA, 413 bp, Zea mays
  Clone ID: LIB3180-038-P2-M2-C5
aaggactctttttgaacagaacataagggcagcaccagtactgaatccagaacctggggctcctactgattggcaggggaggtaccttggtgtcatcgattactcggcaatcatcctttgggtactagaaaatgctgagcttgctgctgttgcactctcggctgcatcggcaactgctgctggagttggcatgggtgctgttggtgctgttggggtggcagctttgggaacaactggcccagctgctgtagctggcttaactgcagctgcaattggggcttctgttgctggtggattaactgctgaaaagggtgtggcgaaggatgggctaactgctgcagatcatttaagggaggatttctacaaaggtttaacttagcaggaacctttcagatcaacaacaattcgatcga

SEQ ID NO: 28818 - DNA, 365 bp, Zea mays
  Clone ID: LIB3180-038-P2-M2-C6
ttcgaattacgattcccaatccagaaaaccttaccagccttttgaaaactcagagagggacccgatggcacccaaggcggagaagaagccgccggctaagaatcccgcagaggaggagcccgcggccccggcggagaaggcccccgctgggaagaagccgaaggcggagaagcggctcccggcgggaaaatcctccggcaaggaaggcggtgttgacaagaaggggcggaagatggccacgaagagcgtggagacgtacaagatctacattttcaaggtgctgaacctggtgtacccggacatgggcatctcctccaaggccatgtccatcatgaactccttcatcaacgacatctttgagaagc

SEQ ID NO: 28819 - DNA, 284 bp, Zea mays
  Clone ID: LIB3180-038-P2-M2-C7
gccaagcttaaggatgttctcgtgtagaccattgttttccacttgtatgctactgagtttgaggcagagcgccttgaggaaaattttcggagtagcttgcataggaagcagcagctgcttcctttttatgtgattttccattgcaaatcctagcagcatggtcttctttttctttcccttgcgttttgttatgcgcccttaacagctcggtgtaggtttagaaggcacaacaaaactgtaccagaatatttgtacctttggaattctgaatacatagattgaac

SEQ ID NO: 28820 - DNA, 341 bp, Zea mays
  Clone ID: LIB3180-038-P2-M2-C8
tcgctagttctagatcgcgagcgggggccgggttttttttttttttaaggtggaaactccagttcgtttctttttttaaaaaaatgtataaacatgtcttacattacagaccagaacatctgggttaggtgacagcatatagttttggatgaagctaccctatgcacaaacggaggtcaaaagcctaaacaccacaaaattcgactaatctgtgcctcgaatcgacaaaacccttggaagaagagactatattattcatctgccctgaactatactatgaatacttctgtcatataactctttagaactgaagatcttgctgcacttcatgcaccacagta

SEQ ID NO: 28821 - DNA, 395 bp, Zea mays
  Clone ID: LIB3180-038-P2-M2-C9
gatggttcccactaagcccatggtggtggagaccttttctcagtatcctcctcttggtcgatttgctgtccgtgacatgaggcaaacggtggctgtcggagtcatcaagagtgtggagaagaaggacccaactggagccaaggtgacgaaggctgctgccaagaagaaatgatctatctggctggtgacgaaggctgctgccaagaagaaatgatctatctggctggtgctgtgcttgcttgttggttacctcgtggaagcttaaaatatctcgtcttgttgacatccttgcagttgtcgcgtgaacaagtaatctatgatggcaatgtttgcctggtcatgaagtattattactttcgttgaaaccgtgatgcttttaagacttaatttttttt

SEQ ID NO: 28822 - DNA, 415 bp, Zea mays
  Clone ID: LIB3180-038-P2-M2-D1
cttgttagcaactttcacggatgtagcttccatacgaagacatggcacctcttcaggcagcagttgccgttgttcaaagagatgctggcagaaagatcctgctctaagaccaacctttgcagagattatggttacaccaaactctataaaggaggtggttcggagttctgggcattacaagaggcatttaggtcgatctcactcttcttcgagtttatgcgcgctgcccaggacaacatcacagcgctgatggagttggacgatgtcatcgggctcgactggatctagatgggatggaccctgcttgcgctgaaggagagagagagggcgtacttggcttgcaggggatcgtagtaaggttcatctttttcatgggtcatgttatctggcatgtcagattacacaacttaagtta

SEQ ID NO: 28823 - DNA, 408 bp, Zea mays
  Clone ID: LIB3180-038-P2-M2-D10
ggacctcttgagttggatgcttggcagatggaacaaacaaaactatttcaagcacttctctttaatagtttgtttggaaaactgttcattggatcaaaagcatcaaaaaccccaagggagttcattctcaagaaagatgatgtgttcctttggaacaaagaaaatatgtatttgcttttacctgtggattctactctggattctcataaaagtgtttgcatcaactggagtgtaattgatgtagtggctacagctgttggattcatgagaagcatttattcagatggcaaatgtaacctaactgataaacttaattatgaaaaaaatggtgaagatcttattcatttggccaacaagtcatgcaagggtaatgatcttaaaaatatggtggttctagcaattcacact

SEQ ID NO: 28824 - DNA, 219 bp, Zea mays
  Clone ID: LIB3180-038-P2-M2-D11
tcggcgccgaccaaacagggtcctcgtcacagaacacgcgccccacccgtctcgtcgcgccgatccagcccggcgctcggccccgcggcgtgtgcaatggcccttgacaccgccgacgccgacgcgccgcgcttgcgccttgatgccagcgccgccgtgcacccgttcctttccgacgacggttccacggccgtgggggagactgtggatcagttggtc

SEQ ID NO: 28825 - DNA, 415 bp, Zea mays
  Clone ID: LIB3180-038-P2-M2-D12
ctgcgccgtccttcacctccgccgccgaatccgagactctgatctcgggttcaccgcagcgcacagagcacccctgactcccggcccgatccgcgctctcctctccgacgcttcagtcatggcaggaatggcacccgagggttctcagtttgatgctaagcactatgattctaaaatgcaggagctgctgagcactggtgagactgaggagttcttcacttcatatgatgaagtttttgaaagttttgatgacatgggccttcaagagaatcttctgagaggcatttatgcatatggttttgagaaaccatctgcaattcagcagagaggaattgttcccttctgcaaggggcttgatgtcattcagcaagcacaatctggtacaggaaagacagcaaccttctgttctgggatc

SEQ ID NO: 28826 - DNA, 404 bp, Zea mays
  Clone ID: LIB3180-038-P2-M2-D2
gccttgctcgccgtcggcggccatttcgtcgccgcgcggcgagccgcccatgttgagctcgcgtcggatctgatgggcttgttgtgatctcctgcaggtaaggaagaggaggagggcaggatgtcgcaccgtaagttcgagcacccgaggcacggctccctcggcttccttcccaggaagcgctcctcccgccaccgcggcaaggtgaagtcattccccagggatgaccccaagaagccttgccatctcactgccttccttggctacaaggctggcatgactcacattgtccgtgaggttgagaagccaggatccaaactccataagaaggaaacttgtgaggctgttaccatcattgaaacccctccttttggcattgttgggctcgtggcatatgtgaagac

SEQ ID NO: 28827 - DNA, 391 bp, Zea mays
  Clone ID: LIB3180-038-P2-M2-D3
gttgatgtcatctccagcggcagtgccagtgtcaggagcagcatgagtgttgactacagtggcacaaaggaatcaaacagcgagatgaaactttctccgcttcataactcatacccccaaagccttgcaagccaggatgaatacgataccggcacaccaaccgcaagcagtttaagcagtctggtcaacatccacaagcttgcatcccactctcagttcagtgctgcgcctcgccctgcacctccggaaagacctgtgccggcgatggtgcggccacctgttcccaccacacaaataaccaacccagggataccgcggccagctgttcccacaacacaaacaaccaacccgatgttccaatcagccacatcttatgttcgagagaaccgaa

SEQ ID NO: 28828 - DNA, 410 bp, Zea mays
  Clone ID: LIB3180-038-P2-M2-D4
cgtaacaacctcggcttctacggcgtagcgtaggaggcggcggttccaggcgaccatccaataatcgccaccctcacgcgagaaatccccggcaacttttggggaactacacgtgtatggagttttattagtattccaggggcatcacaatggcatactttcctgatgaagtagtagggtatatccttggttatgtaacgtcgcatcaggaccgcaacgcggtgtccttggtctgccgggcatggtacgacattgagcgtcatggccgccattcggtgcttgtaagaaactgttatgcggtgtgcccagagcgtgtacatatgcggtttcccaacatgcgcgcactgagcttgaagggcaaaccgcactttgctgaattcaaccttgtcccggcgggttggggtgccact

SEQ ID NO: 28829 - DNA, 414 bp, Zea mays
  Clone ID: LIB3180-038-P2-M2-D5
aaagagttggttgaacgcatgggtcttggaagggcatcctcaaatgttgagcctcctgaatttggtgctgcagctgatggagatgctgaccgcaacatgattcttggtaaaagattctttgtgacaccgtcggactctgttgccattatcgcagccaatgctgttcaatcaattccttactttgcttctggcctgaagggagttgccaggagcatgccaacatctgctgcccttgatgttgttgcaaagaatttgaaccttaagttctttgaggtgcctactggatcgaagttttttgggaatttgatggatgctggaatgtgctcaatctgtggtgaaaaaagctttggcacttgttctgaccacattcgtgagaaggagggtatttggtctgttctttcattcttttaatta

SEQ ID NO: 28830 - DNA, 421 bp, Zea mays
  Clone ID: LIB3180-038-P2-M2-D6
attagccctgacacgacacggccgcgctcaccagtcacacacgacacgacacgcgacagtccccaccccaccaaccgcctttcgccgtcctcgctcgcgcagctgtcctgcaccagcactgcacccggctacatggcggccgcctccaccctcgcgttcgggcacccaaaaaccctagccgccgccggcgccaagcccctgcccgccgccacctccacgtccgtctccttcccggccacccaccagcccgcgtgcctgctctcctcgcccgcgcccgggtctctgcgccgccgggacgtcgccgccatggtctccgcgccgccggccgtcggcaccgccatgccgtcgctcgacttcgacacctccgtcttcaacaaggagaaggtctccctcgccggccacgacgagtacatcgtgcgcg

SEQ ID NO: 28831 - DNA, 393 bp, Zea mays
  Clone ID: LIB3180-038-P2-M2-D7
attttgagcattcagaaacacaccaagcgaagcacattagcaacaacctaacaacaatggctaccaagatattatccctccttgcgcttcttgcgctttttgcgagcgcaacaaatgcgttcattattccacaatgctcacttgctccaagttccattattacacagttcctcccaccagttacttcaatgggcttcgaacacccagctgtgcaagcctataggctacaacaagcaattgcggcgagcgtcttacaacaaccaatttcccagttgcaacaacaatccttggcacatctaacaatacaaaccatcgcaacgcaacagcaacaacaattcctaccagcactgagccacctagccatggtgaaccctgccgcctacttgcaacagc

SEQ ID NO: 28832 - DNA, 371 bp, Zea mays
  Clone ID: LIB3180-038-P2-M2-D8
agatcagcaaagcggcagtgcgtagagaggatcgtcgaacagaacagcatgaagatggtcatcgttctcgtcgtgtgcctggctctgtcagctgccagcgcctctgcaatgcagatgccctgcccctgcgcggggctgcagggcttgtacggcgctggcgccggcctgacgacgatgatgggcgccggcgggctgtacccctacgcggagtacctgaggcagccgcagtgcagcccgctggcggcggcgccctactacgccgggtgtgggcagacgagcgccatgtaccagccgctccggcaacagtgctgccagcagcagatgaggatgatggacgtgcagtccgtcgcgcatcaactgcagatgatgat

SEQ ID NO: 28833 - DNA, 407 bp, Zea mays
  Clone ID: LIB3180-038-P2-M2-D9
gccggcgccgcagcatgcctgtacctctcggctctcgctcttatccccacccacctcgctttctcccctctacaagaaagcgaccaccgctgtgaatcagcagagctgcagtgagagcaagtgagaggatcagaggaggcatccgtgaccaaagatcgagtagccaagaagaagagagatgaacgccgacttcggcgcgcccaaggagctcgcgggaggcctgcagcagcggcgggccctgtaccagccccgcctcccgccatgcctccagggaccgacggtaagggcggagtacggtgacgcgaccacaaccatcgatcccacctgtgcccaagccgtcgcgcaggccttcccgcacacctttggccagccgctcgtcagctttgtcgcgccggccgccggcgccg

SEQ ID NO: 28834 - DNA, 383 bp, Zea mays
  unsure at all n locations
  Clone ID: LIB3180-038-P2-M2-E1
ggcagatccactactacaacacgaggacgaagaagcggacgtgcaaggaccccaggggccacgggcagccggactaccgcgccgaagaaggccaggaggaggaggaggaggactccgcgaattgcgcgccgccggggctggacctggagctgaacctcacgttcgagccgcgccgcgtgctcgccgcccacgggaagacgacgaagagggccaagcagcatcccgcggaggaggaggaggaggcctaggacgacgacgacagcgacagcagcagcagggagatggtggctggcgtgtgcgtgcggtgccacatgctggtgatgatgtgccgngccagcccggcgtgccccaactgcaagttcctgtacccacccagccgggcc

SEQ ID NO: 28835 - DNA, 375 bp, Zea mays
  Clone ID: LIB3180-038-P2-M2-E10
aacgaacgacgcagcccaacccgttcccaccaaaccagcggcaccacccatggcttcggcggcggcgagatccggtctccggtcgctggcggtgcgcgccgccccgttgaggcgccgcatgtcctcctccgtccacgacgacgcctatgagacggccaagtgggagaagatcacctacgccgggatcgtgacctgcaccctcctggcggcgtacaacctgtccaagggccacccccacttcgatgagccgccggcgtacccctatcttcacatccgcaacaaggagttcccatggggccctgatggcttgtttgagacgaaggaccaccactgagccctgattagcacaccttcaggagctggtgcacgcttaaa

SEQ ID NO: 28836 - DNA, 372 bp, Zea mays
  Clone ID: LIB3180-038-P2-M2-E11
gtcgcatcccatcccactaccacccatctcgtcgtccgccgattcgatccggttcttccaacccaggggcagtgatggcgacgaagaggagcgtgggcaccctcggcgaggcggatctgaaggggaagaaggtgttcgtgcgcgccgacctcaacgtcccgctcgacgatgcccagaagatcaccgacgacacccgcatccgcgcctccgtccccaccatcaagttcctcctcgagaagggcgccaaggtcatcctcgccagccacctgggtcgttcaaaaggtgtcaccccaaagtacagcttgaagccttttgttccacgcttgtctgagcttcttggagttgaagtcgtgatggccaatgtttgcattg

SEQ ID NO: 28837 - DNA, 403 bp, Zea mays
  Clone ID: LIB3180-038-P2-M2-E12
acgacacaacaagtacccaaccactccttgattcccctttcctccctctcgcattcgtctccaccagccggtcggacttcttgcgctccaagaactcggcgaggatggaaatgttttttggcagctttctcagtgaatcagtatcaccgcagaaccttttcggacacccggatgttgagagatgcccattcctgaggaatatcaatggagctacaaccttttccctcgcttctgctttgccagtagctgctcaaggaggcaagggtccaatttttgaggaagggtcaggctttgagtcagcattcaagcttttccatggccgagatggaatagttcccctttcagaaagatcatatgtatctgatgaaaaccacaatgagagcattgatgtcaggactgaacc

SEQ ID NO: 28838 - DNA, 366 bp, Zea mays
  Clone ID: LIB3180-038-P2-M2-E2
gtccaccaacctggtcacctaaatgttcgacgcggagatcatccagatggtgtaacttgtgatcagcaccttgtagttgaacatggagatgaccgtgcgggcgatcatctgcaactacaaccagacggtggacaagatcaagatcgcgagtatcactaacaggagcatgctggatcggcaggctgagatcttgatccaccttgtgcgagacaaggccacgaacacgctgtccatgatcgacagcggcatcgggatgaccaagtccgaccttgtcaacaacctaggttccatactcaggtacgggacgaaggagttcatggaagccattgctgtcggcgctgatgtgtccatgattggccagttcgg

SEQ ID NO: 28839 - DNA, 372 bp, Zea mays
  Clone ID: LIB3180-038-P2-M2-E3
gttctagatcgctagcggcctccctttcttgtttttttcaatccaaatatcgcaaactttttaaaggaacttactattgcaaagcggcacgggtttacactcaacaacaagcgagctgcccaaatcataaattcatatatattatcagacattgcgatatcatattaggtattatcattggacacactctaagcgccgcaaacggataagtgagttcacgaagcacaacaacaaaaatacacgactgatacgctacatgatctaactgggtaaacagatggcgagatggcacattgaaggtatatttgccaatgactgcattccaactgaagaagaaacttgcaccttctaccttggagtggaaccttactt

SEQ ID NO: 28840 - DNA, 86 bp, Zea mays
  Clone ID: LIB3180-038-P2-M2-E4
gatagctatgaataaatagttgttatcttattttcgagtgtccaaattaattggaggcgaataaccttatttggtctgctttagtc

SEQ ID NO: 28841 - DNA, 309 bp, Zea mays
  Clone ID: LIB3180-038-P2-M2-E6
ttcgccgtctgccttctgcgcctccatttcggcctctgtcccttgcaagttcagtctcgcctccaaccatgggtaaagagaagtcccacatcaacattgtggttattggccatgtcgactctggcaagtcgaccaccacaggacaccttatctacaagcttggaggcattgacaagcgtgtgatcgagaggtttgagaaggaggctgctgaaatgaacaagcggtccttcaagttcgcctgggtgctcgacaagcttaaggctgatcgtgagagaggttctaccatttatttttctctgcttaagtttt

SEQ ID NO: 28842 - DNA, 341 bp, Zea mays
  Clone ID: LIB3180-038-P2-M2-E7
gccgcttcctcccgttagactaggttaggctaggctagggtgtcgaccagctcgcggtaatggtggccttcaggttccatcagtaccaggtggtggggcgcgcgctgccgacgcccggcgacgagcaccccaagatctaccgcatgaagctctgggccaccaacgaagtccgcgccaagagcaagttctggtacttcctgaggaagttgaagaaggttaagaagagcaacggtcaggtcctggccatcaacgagatcttcgagcgtaacccgacgacgatcaagaactatggcatctggctgcgctaccagagcagaaccgtctaccacaacatgtacaag

SEQ ID NO: 28843 - DNA, 380 bp, Zea mays
  unsure at all n locations
  Clone ID: LIB3180-038-P2-M2-E8
tcttcctcctttcttgacgacctccgttcccgggaggtgtaggttgatttnttatanttattttatatttttttttttatttttttatatatatttttatatttttttttttattttttttattattttttttttttttttttatttattttttatatttttatattatttttatttatttttattttttatatttttttttttattttattttttataattttttttttttattatttttttattattttttttattttttttttatttttttattttttatttttttatttaattatttatttattttttttatatttaattttttaatttttatatttttttttttttattttatttttatttttatttttttattt

SEQ ID NO: 28844 - DNA, 360 bp, Zea mays
  Clone ID: LIB3180-038-P2-M2-F1
tttccatcgagttggattgggttcaaagttgggcttttggacagctgtggtgtgcacggcagctctgtgacttgtgaggaggaagggagcggatccatggcgtcgaagcggatcctcaaggagctcaaggacctgcagaaggatcctcccacctcttgcagcgcaggccctgttgccgaagatatgttctactggcaggcgacgattatggggccatcagatagcccatacgctggtggcgtatttttggtcactattcactttccaccggactacccattcaaaccaccgaaggttgcattcaagacgaaggtttaccatccgaatatcaacagcaacgggagcatctgtcttgatatt

SEQ ID NO: 28845 - DNA, 339 bp, Zea mays
  Clone ID: LIB3180-038-P2-M2-F10
acagcacaggcagttcgagagagagagagagagagagagagataaagatgtcgtggttcgggcaccaccaccacaaccagccggctcccccggcgtcgggccccaaccaggtgttcaagatcttctgccgcgccaacgagaactactgcctggccgtccgcgacggcgccgtcgtgctggccccggtcaaccccaaggacgaccaccagcactggtacaaggacatgcgcttcagcacccgggtcaaggacgaggaaggcatgccggcgttcgcgctcgtcaacaaggccacggggctcgccatcaagcactccctcggccagtcccacccggtcaagc

SEQ ID NO: 28846 - DNA, 402 bp, Zea mays
  Clone ID: LIB3180-038-P2-M2-F11
cagccatagaaaaggctggctacactggaaaggtggtcattggaatggatgttgctgcttctgagttcttcggtgagaaagacaagacttatgatcttaatttcaaggaggagaacaacgatggctcaaacaaaatttcaggcgacagcctgaaagacctgtacaagtcctttgtttctgagtaccctatcgagtcgatcgaagatccatttgatcaggatgactggagcacttatgccaaactcactgatgagattggacagaaagtgcagattgtaggagatgatctttttgttaccaaccccaccagggtcgccaaggccatcaatgagaagacctgcaatgctttcctcttgaaggtgaaccaaattcggtctgtgaccgagagtatcgaagctgtca

SEQ ID NO: 28847 - DNA, 271 bp, Zea mays
  Clone ID: LIB3180-038-P2-M2-F12
ctcatctcatttttctatttcggcccctctactgttccaataataataaaaagattctcgattcgatttactcgccaattttcagtgagcggcggcgatcggcttcggatcggcgcagcgcggcggagcggagatggttgccgtggcggtggatggcctgatccgcggtgcggacgccgtgccggcggcggagagggaagcggtgagggcggcagctgcggaggcggcggccaagggcggtgagggggaatcggggaaggaggaggtgagg

SEQ ID NO: 28848 - DNA, 376 bp, Zea mays
  Clone ID: LIB3180-038-P2-M2-F2
gcagaatcaatagctgcactagcgcgtattgacactgtgaaacagcgcatggaagccgcatacacaacattgcaggatgctgctgggttagctcagttgagccagagtgttgaggatgtgttttctagtggcaatcttccaaaagctgcagaaaccctggcaactatgagacattgcttgtcagcagttggagaggttgccgagtttgcaaacgtcagaaaacaacttgaagtattggaagaaaggctagatgaaatggtgcagcctcgattagtagatgcactttctaatcgcaaggttgatgccgtgcaagatcttcgtggtatactgatccgtatcaataggttcaagtcactggaagtgcaatacactaaga

SEQ ID NO: 28849 - DNA, 293 bp, Zea mays
  Clone ID: LIB3180-038-P2-M2-F3
aattcccgctttgaccaactacagttacttttgaaaggtgtcagtgagagaggagcaaaaaaaattcgtgtgcacatccttaccgatgggcgtgacgttttggatggaagcagcgttggtttcgtggagaccctagagaatgatcttttggagcttcgaggcaagggtattgatgcacagattgcatctggtggtggaaggatgtatgttaccatggaccgttatgagaatgactgggatgtggttaaacgtggcttggatgctcaagtaattcggagaggcacccttacaaa

SEQ ID NO: 28850 - DNA, 416 bp, Zea mays
  Clone ID: LIB3180-038-P2-M2-F4
cggagctttaaattcgtcgaaccaatgggcgcggacgacatacagatcgaactggtggaggcatacacccaaccaattttataaggccatcaaacaaggaaaaagatctcctccatggcgacgcgaaggcctggagctgacgctgatctcgggcaaggacctcaaggacgtgaacctgatgtacaggatggaggtctacgccaaggtgttgctctgcggcgaccccccgtttggtcagggtttccaggccgaccgcactggctgacgtaaccctacctggaacgccacgcttcgctttgacctactaactattgacaccggttctctttaattactttttttttctttagggttttttcaaatactgttacttttacattgtaaaaggtacttttttcttaatttatttttttttt

SEQ ID NO: 28851 - DNA, 422 bp, Zea mays
  Clone ID: LIB3180-038-P2-M2-F5
tcgaccaccacctcctactccgttgcaaccccaaatgtctccttcctcgcatacgcgcgcagcagaggagctgagaccaacgaagaagaagaacaaccgagcaagcacaagcttagctagcgtggaggtgcccaaggcgacgacggccgccgcgccaggctagccaaccagctgctcatcgctcctagctgcggagccgatggctggagccgacgtcgacgtcgggacggagctccgcctcggcctgccaggaggaggcgccgatgcggccaaggctgccaagaggggcttcgaggacaccatcgacctcaagctgaagctgcccaccgccggcatggaggaagctgccgctgccgccgccgccaagccggagccggccgccgagaaggccaagaggcccgccgaggcgccggccggtgatg

SEQ ID NO: 28852 - DNA, 455 bp, Zea mays
  unsure at all n locations
  Clone ID: LIB3180-038-P2-M2-F6
caccgcgtctcgcttttggcattcaatacaaattagaccaagagggccacgctttatcacaccgcctatccgcgagtcacatacccagtgcacccccacgagggtgcaagaactctgtaccgaggagaggggaaagaactctgtgaagagaggagctttgaggaagttgaggnagatggcgagccgccgagggcgagaggntgggtgggaccttggcgacggactttctcgcagggtgatgccgagcgtgcgctgcagntggtgcggcgaccaaacctgctccgcgccggtgaccaacctgctgctgctgcacgtcatcaaggagcccgactacgagcagagcgaggccatcctctgggaatccaccggctccccgttgattcctttctcggaattctctgaccctatcatcgcgaagaaatatggagcaaaacccgacatggaaaccttggacc

SEQ ID NO: 28853 - DNA, 275 bp, Zea mays
  Clone ID: LIB3180-038-P2-M2-F7
ctctgcgggtgcggctcgccgttcgccatccgagccaacgacgaacccgatgccgccccaccgtgccggaggggccgcaggcggcggcgacacgagcgcgttcttcgcggcgacgctagtactttgggctgtgtctgtggggttcgagatcggcgtgcgggggagacgcgagctggcgcccgtggccgccggcttcgcctttttccaggccgccaacaccgtagtccgcggttcggtctcccgcgatccgttcttcgttaacacctgtgtattgt

SEQ ID NO: 28854 - DNA, 359 bp, Zea mays
  Clone ID: LIB3180-038-P2-M2-F8
gaggggctcgtccgcggccagcgcgtcctcaacactggctcccccatcaccgtgcctgttggcagggctacccttggacgcatcataaatgttattggtgaaccgattgatgagaagggtgacataaagacaaaccacttcctccctattcatcgtgaagcccctgcctttgttgagcaggccactgagcagcaaattcttgttactggaatcaaggtcgtggatcttcttgcaccctaccaaaggggtggaaagattggcctcttcggtggtgcaggagtgggtaaaactgtgctcatcatggagttgatcaacaatgttgctaaggcccattgggggttctctgggtttgctggtgt

SEQ ID NO: 28855 - DNA, 422 bp, Zea mays
  Clone ID: LIB3180-038-P2-M2-F9
ctgggagggactgggccaaaccaagaccatcccatacctcttctcccctgccggtggtgtggttcacctcccacttactcactcactcactcgcggacactgccacaaacttccgccccagatctccgtatataacacgccggcggcccgtccgtccgggctcctgactccggatccaccgccgccgcgccgcactctccctctcactccaccgccgaagtactccccgcctgccactgccagcctgtgcctgcacaaaagcaaaaatggcgccttggccgcggcggcccgtgctgacgctggtgctgctcctgctgctcgcgctcctgtgctcccacgtcgcgctctgctcctccgccgaaccggggaaacccaagcccaagcccaaggtctccggcagcccgaaggcgctgcttgcggac

SEQ ID NO: 28856 - DNA, 410 bp, Zea mays
  Clone ID: LIB3180-038-P2-M2-G1
cgaagcgttcggcctgactgtgatcgagtccatgacgtgcggtctgccaacgatcgcgacctgccatggtggccctgctgagatcatcgtggacggggtatctggcctgcacattgacccttaccacagcgacaaggccgcggatatcctggtcaacttctttgacaaatgcaagggagatccgagctactgggacaagatctcacaaggcggcctgcagagaatctatgagaagtacacctggaagctctactccgagaggctgatgaccctgaccggcgtgtacgggttctggaagtacgtgagcaacctggagaggcgcgagacccgccgctacatcgaaatgttctacgccctgaagtaccgtagcctggcaagccaggttccgctgtccttcgattagtacgggg

SEQ ID NO: 28857 - DNA, 372 bp, Zea mays
  Clone ID: LIB3180-038-P2-M2-G10
cgcggttgcagcttgcagggttgtccccttccgttctgcattcctcgtcccgtccgcccccgatacggcggccacaccccacacccccacacttttccgacaagggaagggaaccccagatctccgccgccccgccagccgctatgccgactgccgccaaccccgccgccgcgctgcccctcaccctcgacctcgaggacttcaagggagacttctcattcgacgctctgtttgggggactggtggacgagctgctcccggagtaccgcggggaggacgacgccgtgcccgcgccaccttctccgtcgtccgtgctcggggcggccccgcccgtcttccccgctgttgacgagcttcttgggctgttcaagc

SEQ ID NO: 28858 - DNA, 419 bp, Zea mays
  Clone ID: LIB3180-038-P2-M2-G11
atctgtgagaatatcatctggaaggcatttagccccacaaccatcaacagtggtcgtggtgctgaattcgaaggggctgtcattgcactgttccatctgttgattacgagaaccgataaagtccgtgctcttcgtgaggctttctaccgccagaaccttccaaatgtgaccaatttgcttgccactgtcttggtattcctcatagttatctatttccaaggcttccgtgttgtgcttccagtgagatcaaagaatgctcgtggccagcaaggctcatatccaattaagctgttctacacttcaaacatgcccatcattcttcactctgcgctgattaccaacctctattttatatcccagcttctctacaggaagtacagtggaaacttccttgttaacctttcttgggaagtggaagg

SEQ ID NO: 28859 - DNA, 384 bp, Zea mays
  Clone ID: LIB3180-038-P2-M2-G12
tctcgtctctcctggaccagcttctccatcctgagggggagaacccgtcggcgggcaaggatcaagtcattgccactggtctgccagcctcacctggggctgctgtgggccaggttgtgttcactgctgaggatgctgaatcatggcattcccaagggaaagctgctattctggtaagggcagagaccagccctgaggacgttggtggcatgcacgcagctgtggggattcttacagagaggggtggcatgacttcccacgctgttgttgtcgcacgtgggtgggggaaatgcttcttctcgggttgcttatgcattttcgttaactatttcaaaaatttcttgtcaattcgttagtcttttactttctcaaatgttatttgct

SEQ ID NO: 28860 - DNA, 364 bp, Zea mays
  Clone ID: LIB3180-038-P2-M2-G2
ccgatcgttcctctccactttacacattccagttccattccaacttcgatgccgggcgacaactaccaaactacgacagttcgtccacatgaaggatgagcgaagaggataagactgatgcttctgctgagcagacggagagggcccctatgctaaatgaacggatcctcttttttctgcccaggaggagcgtacttgctcatccggggcatgatcttgagatcggtcctgatgctccggctgttttcaacgatggaggggcgaacacaaacggacgcaaaggtaaatatgagcttgacatgaaaactgtactgatgaaggttgatcgagcactatacttataagttttatacactcacaatta

SEQ ID NO: 28861 - DNA, 406 bp, Zea mays
  Clone ID: LIB3180-038-P2-M2-G3
cggccattggtcaggctgctgaagccatttgatgagcttgttgttgacagcaaggattttgatgtcgctgcactgatgaagtttattgatgctagcaccatccctagagttgtcacttttgacaagaaccctgacaaccacccatacctcatgaaattcttccaaagctcagcccccaaggctatgctgtttttgaacttctccaccggaccttttgattctttcaagtctgcctactctgctgccgcggaggaattcaaggacaaggaaatcaagttccttattggtgacatcgaagccagccagggtgccttccagtactttggcctgaaagaggaccagacaccccttatcctcatccaggatggtgactccaagaagttcttgaaggttcacgttgaggctg

SEQ ID NO: 28862 - DNA, 401 bp, Zea mays
  Clone ID: LIB3180-038-P2-M2-G4
gtcacggaagaggcgctgcccacgtaccagaccatgatcaacacgctcgacggcgtccgcgacgagaccggcgccagcaactgcccctgggcggtctggacgcgcgcctggaccgccgaggagaaccgccacggcgacatcctcggcaagtacatgtacctatccggccgcgtcgacatgcgcatggtcgagaagaccgtccagtacctcatcggctccggcatggatcccggaacggagaacaacccgtacctgggcttcgtgtacacgagcttccaggagcgcgcgacggccgtctcgcacggcaacaccgcgcggctcgccagggcgcacggggacgacgtcctggcgcgcgcctgcggcaccatcgccgccgacgagaagcggcacgagacggcgta

SEQ ID NO: 28863 - DNA, 348 bp, Zea mays
  unsure at all n locations
  Clone ID: LIB3180-038-P2-M2-G5
atctcacccgactcgtcagacgtcagccagcagttcgaaaccaaggatcgatccaggagcttccggaaggcgaggcgcgcgcgcagcgtcnaggtgctggtgccggtgccgcccatggatcgggctcgcggatccgcgttcctgctcggcgtcctgctcgcaggatccttgttcgcgttttcagttgctaaagaggagaccaagaagctcgggaccgtgatcggtatcgatctcggtaccacctactcctgtgtcggtgtctacaagaacggtcatgttgagatcatcgccaatgaccagggtaaccgtatcacacccttatgggttgccttcaccgatagcgagagg

SEQ ID NO: 28864 - DNA, 406 bp, Zea mays
  Clone ID: LIB3180-038-P2-M2-G6
cccacgcgtccgccgcagcctccaaagccactcccaaacccccgcttccagaaccttctcgaagctccccgccgcctcctccactcgcaccgatggcgaaggaaccaatgcgcgtgctcgtcactggcgccgcaggacaaattggatatgccctggttcccatgattgctaggggtgttatgcttggtgcagaccagcctgttattctgcacatgcttgacattccgccagcagctgaagcccttaatggtgttaagatggagttggttgatgctgcgtttcctcttctgaagggagttgttgctacaactgatgttgtggaagcctgcactggggtcaatgtggccggcatggttggtggattccccaggaggggggaatggaaaggaaagatgttttgtcgaaa

SEQ ID NO: 28865 - DNA, 372 bp, Zea mays
  Clone ID: LIB3180-038-P2-M2-G7
ctgatttgtttaccccccgaaaatttgccgtctcctcgtctcgctcctctccctgcgcagcccccagatccggcaccgcccgctcctcgatccccgcaccccacgcccgcaggccgggaccggcggggtcgcgcgccgggtaggaggaggagaagaggaagggcggtatggcggcgccgccggcgagggcccgggccgactacgactaccttatcaagctgctcctcattggagacagcggtgttggcaagagttgcctcctgttgcgggtctctgatggttccttcactacaagctttattaccacaattggttttgactttaagatacgaacgttagaattggatggcaagcggataaagctacagattt

SEQ ID NO: 28866 - DNA, 313 bp, Zea mays
  Clone ID: LIB3180-038-P2-M2-G9
tcggttctagatgcgagcggccgccgggttgtttttttttttttttgggtgttgtttttaaaaaattctgcccaaatgggataaacccttaccttaacaagcagtccgcagcctgcattccacagaactaccatttttttggtagaggctccttatgaactgtacaacaaccacagttgccacatagagatacagttgctccctttttatctcccccgcccacccccgttagtccactaccctatttctgagttcattttttttacacacaagttggggtttgaatcgccttaccagtttttaggcccgaaac

SEQ ID NO: 28867 - DNA, 245 bp, Zea mays
  Clone ID: LIB3180-038-P2-M2-H1
tttaacaactccctccatcgtcttgaggcgggcgcagccatggctgtcctcggcaccgcggcggttgaggtgctcatcccggtagcggcattggttggcatcgctttcgcgttgttgcagtggtatgtggtggccagagtccccgtgccttcgcacgccggcgaggacggcggtggaggaggcaataagaacgtgagggaggaggaggagcatgtgaaggaggactgcatgtactaccttttttt

SEQ ID NO: 28868 - DNA, 345 bp, Zea mays
  Clone ID: LIB3180-038-P2-M2-H10
cctgaaaccaaccagatcacacgaaccgaaccaccgtttcctcccccgagcggagaggagcctcaccgccggcgcccatggcgacacgctacttgatcgtgtcgctgcccgtgcagtcgcccggcgccaccgccagctccctgtggtcgcgcctccaggactccatctcccgccactccttcgacaccccgctctaccgcttcaacgtcccggatctccgcgtcggcaccctcgactcgctcctcgcgctcagtgacgacctcgtcaagtccaatgtcttcgtggagggcgtgtcacacaagatccggaggcagatcgaggacctcgagcgccccggaggggtcg

SEQ ID NO: 28869 - DNA, 391 bp, Zea mays
  unsure at all n locations
  Clone ID: LIB3180-038-P2-M2-H11
cacaagtgcccacttgcagtccagaacgccaacttgagagcatccaatggcaatcgcttaaacacacaacggctgtcctagtcgtcgtcatcagtgcgctggtcggctggtgaactgggccatctcgtctcgtgacgatcagccccgggccgtaagcccaccggatcaacagcaggccgcagattcccctgtttccagaactccgtcgaatcctcccctcctccacgcagacgcagctcgctctcctctcagcccccacccatcgagcccctagcgccggcgcctggccgtatggaggctggtggcgaggagttcgcgatcggcgtggtgctctccgcgaagaccaccctgggggaggagttcgagggccagatcgtngccttcgatcgac

SEQ ID NO: 28870 - DNA, 404 bp, Zea mays
  Clone ID: LIB3180-038-P2-M2-H12
tctaagcagataatttgctgctgtagcaagatggatgctactacacccaagtattcaaaggcccgttatgatgagattgtgaaggaagtctcttcctacctgaagaaggttggatacaaccctgataagatctacttcgttccaatctctggttttgaaggtgacaacatgattgagaggtccaccaaccttgactggtacaagggcccaaccctacttgaggctctggacttgatcaatgagccaaagaggccttcagacaagcccctgcgtctcccccttcaggatgtgtacaagattggtggtattggaactgtccctgttggacgtgttgagactggtgtcattaagcctggtatggttgttacttttgggcctactggtcttactactgaggttaagtc

SEQ ID NO: 28871 - DNA, 369 bp, Zea mays
  unsure at all n locations
  Clone ID: LIB3180-038-P2-M2-H2
cccgcgtttgccggccccatggccgtcggaggggccgtctccagccaaaatccagtancancccgtaacctcctgccgatctaggttggtgcgcgctaccgcttccctccccttctgctccccgtcgacgccatctcctcagccccagattgcatctccctcttcttcctctggttctttcggcccgggcagaatgcctcttttttttcttcttcttcttactcgcaggctgcgggcttatgctcgaaggcgcgatctttacgctcggagtggcttcgtttcaggagacggnggatttcttctcgcccttttcctcgccttgcggctgcggaataccggggccggcctggatttgctcgagagtgagag

SEQ ID NO: 28872 - DNA, 421 bp, Zea mays
  Clone ID: LIB3180-038-P2-M2-H4
gcaaaccttgctgcctactctcagcagcgacagtgtcttccattcaaccgactagctgcattgaactctgcttcttatttgcaacaacaacaactaccattcagccagctatctgctgcctacccccagcaatttcttccattcaaccaactgacagctttgaactctcctgcttatttacagcagcaacaactactaccattcagccagctagctggtgtgagccctgctaccttcttgacacaaccacaattgttgccgttctaccagcacgctgcgcctaacgctggcaccctcttacaactgcaacaattgctgccattcaaccaacttgctttgacaaacccaacagcattctaccaacaacccatcattggtggtgccctcttttagatttcttatgagttatagttcaataata

SEQ ID NO: 28873 - DNA, 409 bp, Zea mays
  unsure at all n locations
  Clone ID: LIB3180-038-P2-M2-H5
gaaagctgtgacgcttccaggtaccgattctccagttccgacccacgcgtctcggcatctcgacaacttccctaaccgtccgagaccccagagcaccagtcgcggctggcggtcggcgggcggcgaccaatggctttgtcgggaaagaaccaaagaggatcttccaagtggaaacgaagggtggcacagaaaaaganccgtcganccctttctctaagaaggattggtatgacatcaaggcaccgtcggtgttcagtgtgcgcaacatcgggaagactctcgtatccaggacacagggtaccaggattgcttctgagggtctgaagcacagagtctttgaggtttgcctagctgatcttcagggtgaccaggatcaagcttacaggaaaatcaggctccgtgctgtaga

SEQ ID NO: 28874 - DNA, 378 bp, Zea mays
  Clone ID: LIB3180-038-P2-M2-H6
tcctcgttcaccgtgaaagagaaggtggacttgaagactccaggagcttcaaagaggcaatatcttggtggatcaacacagagtatgaaggatgccatgtctgctttgaaccaggaggtgatgcagattggccaggcaatgtataaccagtctggtgccagtgctgctgggtctactcctggtgctgaggctgggcctacccctggtaccggaccagcgcagaatgatggggatgtcattgatgcgaacttcacagatagcaattgaggggtgatcgatgcatgaccatgtgttgagcatggttggcataaaggagagtgagcaaatagttccttttttgtgttgggatttttactgtaggctatctagtatggagtt

SEQ ID NO: 28875 - DNA, 413 bp, Zea mays
  Clone ID: LIB3180-038-P2-M2-H7
cagccggccgccgccctcttcttctgcgccggccgctgctctgctctgctctgctctcctctcctcagcgacaatcagccaccgctctcctctctcctctcctcagccaggcagccagccgctgctctctggcgcccacagcagcccagccagcagccagccagcagaccatattggtgagtactgattttgtgcaaccatattgcccaacagtgaatcaatcattcaagctctatttgctcaaccaagttgatgaagctattggtgcatctgcacatctcagaggtcgtaattttcctaggagagctgctggtgggtgtgtgagaaggaatgaagaccttgaggaagaggagactaatttagcaaatgaagattacgaggatgaggaatatattcttgatgatcttgatgtg

SEQ ID NO: 28876 - DNA, 387 bp, Zea mays
  Clone ID: LIB3180-038-P2-M2-H9
tcgctcctctacactcagttccattatcagttgcacttaagcagcatccaggggagggtacagccacacaacagtttgttcataacgtgccaatagacaagtctggtacaaataaccgatttcaggagtcctctgcttctgctgggccatcagacggcaacaaaaccttcccaaatgcagccgtctctcagtacagggatgagttaggtcttgtcgaacagccagcctcaaccagctcaagctcccaaactgttcagccttcgtttggccaggcgggcttgatcagcaatgaagtcccaaccagtgccaaagccatggttagggtgaccccatccaaagtcaaccctggaattgcagcaggggcggctggcaacacgaacgcccccc

SEQ ID NO: 28877 - DNA, 396 bp, Zea mays
  Clone ID: LIB3180-039-P2-M2-A1
ttgttctagacgcgagagctcgcccttcgttgagtttttacaatagaagcgccaggagttgttcaacgcattacaatggccagggttccataatttggcgcaggaaaaaggccgggaacagggcttgttctactactaactggcgaagtaggggcgaaacgaagaacttggacctcctcaggctttggacaggttacgcttcgaatgtgacgactttgtacacagatggttcgtgattctcaggatacgcatgctcaacaaggctccaaacaacatgagctcgtgagaatgtgtaatacacacactggtgaacgcacgagaggctcttaataatggttaaaggcaagacaaacttttatgaactatacggactgacccagttttacccctagcctt

SEQ ID NO: 28878 - DNA, 288 bp, Zea mays
  Clone ID: LIB3180-039-P2-M2-A10
gatcagcaaagcggcagtgcgtagagaggatcgtcgaacagaacagcatgaagatggtcatcgttctcgtcgtgtgcctggctctgtcagctgccagcgcctctgcaatgcagatgccctgcccctgcgcggggctgcagggcttgtacggcgctggcgccggcctgacgacgatgatgggcgccggcgggctgtacccctacgcggagtacctgaggcagcccgagtgcagcccgttggcggcggcgccctactactccggttgtgggcagacgagcgccatgttcc

SEQ ID NO: 28879 - DNA, 196 bp, Zea mays
  Clone ID: LIB3180-039-P2-M2-A11
cacatgcgatccgcgtgcagccatccgtggtgtagatgacagccaagggaaatggttgggtggtatgtttgacaaagacagctttgtggagacatttgaaggatgggcaaaaacagtggttactggcagagcaaagcttggaggaattcctgtgggttgtatggctgtggtcaaacaaactattattttgctttat

SEQ ID NO: 28880 - DNA, 225 bp, Zea mays
  Clone ID: LIB3180-039-P2-M2-A12
tcgttgcgtacacggtctccctcttcctgtcagtagtagagtgagagtgaggcagcgagtgggagacaaggggaaatggggaagggagcgcaagggagcgatgcggcggcggcgggcggcgaggtggaggagaacatggcggcgtggctggttgccaagaacaccctcaagatcatgcccttcaagctcccgcccgttggcccttatgatgtccgcgtgcgcatg

SEQ ID NO: 28881 - DNA, 84 bp, Zea mays
  Clone ID: LIB3180-039-P2-M2-A3
tagcagttcttctttgcggtgcggccgaggggaagctaaggctcaggcatgggcttcctttaccagtagagtggcggggaggat

SEQ ID NO: 28882 - DNA, 365 bp, Zea mays
  Clone ID: LIB3180-039-P2-M2-A4
tttttgagcattcagaaacacaccaagcgaggcacattagcaacaacctaacagcaatggctaccaagatattatccctccttgcgcttcttgcgctttttgcgagcgcaacaaatgcgttcattattccacaatgctcacttgctccaagttccattattacacagttcctcccaccagttacttcaatgggcttcgaacacccagctgtgcaagcctataggctacaacaagcaattgcggcgagcgtcttacaacaaccaatttcccagttgcaacaacaatccttggcacatctaacaatacaaaccatcgcaacgcaacagcaacaacaattcctaccagcactgagccacctaaccatg

SEQ ID NO: 28883 - DNA, 320 bp, Zea mays
  Clone ID: LIB3180-039-P2-M2-A5
cccaaaggccaaaaccctaaatctcctccctgcctccctccaagcacctagctgccgccggttcccgcgtatgggagggtcgcggcgcaaattgaagcgctcccgcactaaggtccgcgtggggcttccccgccggaaacccaatgaattcaaggcggccttcgaactccccgaggcactcgccgccgccgccggggccggggcgggctgggacgcggagggcagcgtagtgaagaactacgccgcgttcggggtggtggccaacccaaacctactcggtgcgcactcccgcggcacgccttggtttgtccagagcgcgg

SEQ ID NO: 28884 - DNA, 289 bp, Zea mays
  Clone ID: LIB3180-039-P2-M2-A6
tttgcaggtggccctaatttttcccactgatgagagtgttctgaaaaatgatctcagcaccattagaaatgattcccctttgcttctcaccaagactttcatgcatcgaagttcctccacaccatgctcgtctcctagtggcaaggatctccaacagcaaaaagataggggctgtccaattgaactgttagtatgcccgagccgctgttctcgaacaaggcagctcgtgaaggatgttgctagggcaatcaagaaaggtgtggatccagtacctatcaaaagtgggctt

SEQ ID NO: 28885 - DNA, 316 bp, Zea mays
  Clone ID: LIB3180-039-P2-M2-A7
tcggagcatggcgtctgcagtggtggtggacgccgacaacgcgccggagccgacttttcgtaaccttttggaccaggagtccttcaagtgggtcttcgtcggagggaagggcgacatcggtaagactacttgcaactccatcctttccgtcctcctcgccgggttccgcccgtccgtgctcgtcatatccaccgaccccgctcacaaccttatcgacgcctttcagcagtgcttcaccaagttccctactctcgtgcgcggatacaccaacctctacgccatggaaattgacccaaaggttgaaaatgatgattta

SEQ ID NO: 28886 - DNA, 225 bp, Zea mays
  unsure at all n locations
  Clone ID: LIB3180-039-P2-M2-A8
taagagagtgagcgagcgagcagaggcagcgcagcaatggcggcggcaatagtactctccggccaggtgcggccgcttccctcgtcgctgcccctgtccctgctgctgctcctcctcctgtgctgctccggcacctcgtggggatggagcacgtcccggggaggagccgtcagggagtgcggtttcnatggcaagctggaggccttggagctctgccacaaggtg

SEQ ID NO: 28887 - DNA, 263 bp, Zea mays
  Clone ID: LIB3180-039-P2-M2-A9
gcggtggctgtggggcagatcgatggggaggagatattttgcagcggaccctcccccgaccgtgaggccgacgtttgcttcccgtccccctcgttggctttgggcaccgtgaaggcgttatcggtcgacaagcggtgacagggtcctttttcctccccgatctcaagactatcggtggtggtggcgatggggcagatcgggatctattggaaggagatgtttccaaactcacccttcctctaccaccgttccgacttttgctt

SEQ ID NO: 28888 - DNA, 431 bp, Zea mays
  Clone ID: LIB3180-039-P2-M2-B1
ttcgccgtctgccttctgcgcctccatttgggcctctgtcccttgcaagtgcaatctcacctccaaccatgggtaaagagaagtcccacatcaacattgtggttattggccatgtcgactctggcaagtcgaccaccacaggacaccttatctacaagcttggaggcattgacaagcgtgtgatcgagaggttcgagaaggaggctgctgaaatgaacaagcggtccttcaagtacgcgtgggtgctcgacaagctcaaggctgagcgtgagagaggtatcaccattgatatcgctctgtggaagtttgagaccaccaagtactactgcacggtcattgatgcccctggacaccgggacttcatcaagaacatgatcactggtacctcccaggctgactgtgctgtccttatcattgactccaccactggg

SEQ ID NO: 28889 - DNA, 297 bp, Zea mays
  Clone ID: LIB3180-039-P2-M2-B10
gcggcatcggtggacggcggggccttgaggccttgtgctcggcgtgggacgccctcgcgcgcgaaaccgagcaatagtgacaataaaacgccggggctagctgagcctgtttgttcgacctgaataatgaagcagctgtgatatgcatgttgtttcgacacaacgtgtacgcttgcacatcgcttgaactttacgattgcattgtatgcagcaagggtttaaaggctgaatcaataaacggtgtgtaggcgatcactgtttcaaatataaaggggggggggggggggtgattatttt

SEQ ID NO: 28890 - DNA, 381 bp, Zea mays
  Clone ID: LIB3180-039-P2-M2-B11
tcgcggacgcgtgggctgggtcttcagaccattagctttatctactccagagcgcagaagaacccgatcgacaccatgagggtgttgctcgttgccctcgctctcctggctctcgctgcgagcgccacctccacgcatacaagcggcggttgcggctgccagccaccgccgccggttcatctaccgccgccggtgcatctgccacctccggttcacctgccacctccggtgcatctcccaccgccggtccacctgccgccgccggtccacctgccaccgccggtccatgtgccgccgccggttcatctggcgcccccaccatgccactaccctacttaaaccgcccggccttagccttatccccagcccacacccatgccc

SEQ ID NO: 28891 - DNA, 189 bp, Zea mays
  Clone ID: LIB3180-039-P2-M2-B12
tcggttctagatcgcaagcggactctcgacggacacttctactgacaccgggtgccacgcctcgtcggatcgttccgtcgatacctgcggcgaactctggacatgtttgaaaactgccgagcttcgttacccgaaccggtcctagaggtgttagaggaaacccaagcctcaaccctaacctctagcaac

SEQ ID NO: 28892 - DNA, 162 bp, Zea mays
  Clone ID: LIB3180-039-P2-M2-B2
aatgaaatgacgagcaccgttatctcattggtgggctttttctttgccaccggggctatcagagaacatgacagcttcatgtatgtgtactataccataaaatgcagacatgccagtacgaagatttatgcggaattgtaacccttgagctttgtaacattc

SEQ ID NO: 28893 - DNA, 402 bp, Zea mays
  Clone ID: LIB3180-039-P2-M2-B3
ttcccgtcctgtccttccacccggcggctgaaaccctagttctcactcccatcgccgcttcagctccgccgctgcagatggagttctggggtctcgaggtcaagcctggttccactgttaagtgtgagcctggatatggctttgtgctgcacctttcccaggctgctcttggggaatcgaagaagagtgataatgccttgatgtatgtcaaaattgatgatcagaaacttgccattggaaccctctctgttgacaagaacccacacatacaatttgatctgattttcgataaagagtttgagctgtcgcacacatcaaaaactaccagcgttttcttcactggctacaaggttgagcagccattcgaggaagatgaatatccttttttagcattgaattagc

SEQ ID NO: 28894 - DNA, 328 bp, Zea mays
  Clone ID: LIB3180-039-P2-M2-B5
attccccccgccccaacttgtcaggactcaagaggctcccctcctccctcgccgcggaacacgcgcgccgtcgtcgccagcccgggttcatttctccgttccttggtgcggtggtagccgagcgctccggccatggcgttctatcggggcctcaccgcagtctcgagactgcgatcacgcatggcgcaggaggccaccacgctggggggtgtgaggtggttgcagatgcatagcgcgtccgatctcgatcttaagtcccagttgcaggaatttatttcggaacagcaggatcccttaaagaagctcaagtcagagctatggaaagacc

SEQ ID NO: 28895 - DNA, 316 bp, Zea mays
  Clone ID: LIB3180-039-P2-M2-B7
tgcaccacgaggctctccaggaggcgctggctggtgacaatgtggggttgaatgtgaagaacgttgctgtgaaggatctcaaacgtgggtacgtggcctccaactctaaggatgaccctgccaaggaggcttttagcttcacctgccaagtcatcatcatgaaccaccctgggcagatcggcaatggctatgccccaggggtggactgccacaccttccacattgttgtcaagtttgctgagctcataaccaagatcgataggcggactggcaaggagcttgtgaaggaccccaagttcctgaagaacggggatgc

SEQ ID NO: 28896 - DNA, 136 bp, Zea mays
  Clone ID: LIB3180-039-P2-M2-B8
gggatctccctctcattccagaggactccgcgttttttggcccgctgggcgtgcgacgccggcatatagggtttcgccgtctccgccaatggacccaccccccgtgagccccgatcgctgtgggcccagacagggc

SEQ ID NO: 28897 - DNA, 373 bp, Zea mays
  unsure at all n locations
  Clone ID: LIB3180-039-P2-M2-B9
gtttctctccttctagcaccactgccgagggccgaggcaaaaccctagctgacctccatggatagccacggccacgtctctggcggcaagcgcaagggcaagggcaagcgcgcccgcaagccggagccgccggtactcgcctttcccgacaacagccacgaccacaagcaccacgacaccgnaccatcctcctcgcccctctccaccgccggcgtcgcggcgtcagactccccggaccccgagccggcgtcatcctccccagctccccgccgccggggcgcgaagtcccgccgcatccgcaacgggacccacttcgaggtcgatgccgtccccttaccctcgcctccaccgagtnggggcgggcccaaggggg

SEQ ID NO: 28898 - DNA, 400 bp, Zea mays
  Clone ID: LIB3180-039-P2-M2-C1
aataccatgagctaaatttactccaaagggctgaataacttaaccgacacgatcaggttatatcttttggacctttttatattggttataaatggaaggactatcttaacacatacaaacgatgattgtagataaattccactgacgcccaaaaatataccgcttccgggtcatgttccatgtcctgaacaaatgatatgtgcaaattattacctactttccatttcatgtggctgcctctaccatatttacctgaagtaacaaaattcagccattcttctgttgacagtggctttagttcgctattgtagctacagtaagaaaaataaatgtattttgttgacagacgcattcaaaatctaacacatgactcatgaaaagcagcgatctgatacaaaca

SEQ ID NO: 28899 - DNA, 269 bp, Zea mays
  Clone ID: LIB3180-039-P2-M2-C10
ttttaatttgcttgcaaaatatagcaggagccatcttgttttcaatgatgacatccagggcacagcatcagtggtccttgcaggtttgttagcagcactcaaggtggttggtgggaccttggcagagcacacttatttattccttggtgctggggaggctggaactggtattgcagaactcattgttcttgagatttcaaaacagacgtcggctccaattgaagagtgccgcacgaagatttggttggtggactcaaagggtttgattg

SEQ ID NO: 28900 - DNA, 383 bp, Zea mays
  Clone ID: LIB3180-039-P2-M2-C11
caactcgccgtctgccttctgcgcctccatttcggcctctgtcccttgcaagttcaatctcacctccaaccatgggtaaagagaagtcccacatcaacattgtggttattggccacgttgactctggcaagtcgaccaccacaggacacctgatctacaagcttggaggcattgacaagcgtgtgatcgagaggtttgagaaggaggctgctgaaatgaacaagcggtccttcaagtacgcatgggtgctcgacaagctcaaggctgagcgtgagagaggtatcaccattgatatcgctctgtggaagtttgagaccaccaagtactactgcacggtcattgatgcccctgggcaccgtgacttcatcaagaacatgatcact

SEQ ID NO: 28901 - DNA, 425 bp, Zea mays
  Clone ID: LIB3180-039-P2-M2-C12
tcggctgtccggacactaaatcccaaggaagctgattggttctatacaccagtttacactacttgcgatttaactaacgctggactgcccttgccgtttaagtcaccacgggtgatgaggagcgcgatccaatatatttcaaacaaatggcccttctggaataggactgatggagcagatcatttcttcgttgttccgcatgattttgcagcatgcttccactatcaggaagaaaaagctatcgagcgtggaattttttcattgctgcgacgtgcgacattggtccaaacctttggacaggagaatcatgtttgcctgaaggagggttccatcattattccaccctatgctccttccgaaaaaatgcaagctcacttgattttcccagacactccaagctcaattttgtttatttccgggacttt

SEQ ID NO: 28902 - DNA, 374 bp, Zea mays
  Clone ID: LIB3180-039-P2-M2-C2
gggtcttcagaccattagctttatctactccagagcgcagaagaacccgatcgacaccatgagggtgttgctcgttgccctcgctctcctggctctcgctgcgagcgccacctccacgcatacaagcggcggttgcggttgccagccaccgccgccggttcatctaccgccgccggtgcatttgccacctccggttcacctgccacctccggtgcatttcccaccgccggtccacctgccgccgccggtccacctgccaccgccggtccatgtgccgccgccggggcatttgccgacgccaccatgccactaccttacttaaccgtcccggccttagtcttatccctagccacacccatgcccgtgccaacagt

SEQ ID NO: 28903 - DNA, 280 bp, Zea mays
  Clone ID: LIB3180-039-P2-M2-C3
atcttttgcaagcacaactgcacaagggaacaggaggaaaaaagagcgagaactcgcagctgacgcgcacacggcaagccccaatcggagccgcggaccggatcagaactaggtctcgaggcgatggcaagcggaggcgagggcgcagggagcggcgaatcccctcccgccgcctcagtggaggcggcagcggtcgaggcgacgctgcacatccggtgcgcgaacggctccaagttcacggtgcagacggacctgggcgccacggtgggcgcgttcaagg

SEQ ID NO: 28904 - DNA, 262 bp, Zea mays
  Clone ID: LIB3180-039-P2-M2-C4
tttggtcatgacactgcacatcgtcacaggaagccatcggcaggtgctccgaagttggaccttcagttgagcctgtccacctgttcgcctgaatcagccttgaccaatgtaagtgccaatgatggcttagagacagtggcagatactactactactctggaaaagctagagccctggatcttcaggaattacatggcttcatcatcatcatatgcatatgcttctgaagcaacctacggcctttttttgccaaagatacctg

SEQ ID NO: 28905 - DNA, 333 bp, Zea mays
  Clone ID: LIB3180-039-P2-M2-C6
ttaagagccacaggccagaggccacgcggccacgccgtcctcttcaccccagggttgccgacgcggcgactccgatcacccaccaccgctgccccctgtcctccctgctgccgcctgtgccggggctagcccgccgcggagccatgtcgcggtccttgagcatgagagggagcatgagggcgcgccgcgacctgcctcctcctgagaagacaattgaaaggcttgagagtatggtggatggaggaaatttctatgaagctcaacaaatgtacatgtcaaccagggcagggtttattgctgttcaaaagatttcagaaggcctggacattcttt

SEQ ID NO: 28906 - DNA, 337 bp, Zea mays
  Clone ID: LIB3180-039-P2-M2-C7
ttcgcataggccgtcgagttcagtcactccgctactgtagtactgtcttaaaccctcgtcgtcgtctttccgccgcccgtcgcttcgttcctcgcttccccccacaggcccacactctcgcgcgcatcacggcggcggcggcgaatcaccgcgtggccctccacctaagtcctagcccaagcgtaagcgatcgctctccccatcagccaccatggcgccacgcccccgcaagcgggcctcgcgccccaagccccgcccgggctcccgacgtggcggcggcggaggggaccaccatcccttttttgagtccgagcccaagcgccgccgtggaggccgt

SEQ ID NO: 28907 - DNA, 404 bp, Zea mays
  Clone ID: LIB3180-039-P2-M2-C8
tcctcttctccctcctaggcttctgctactggccgccgctatgcttcaccccatgcccatgctcgccgcggctccaggcaccctctcgcggcctcatctctgtctcccttcctcctcccaacgtatctcagtctatctatcctctccgctccgtctccgacgctgaccaccagcgctgcagcaggaggcgccaccacctccgcgtgcgacatctggatcttcgagcccacctgaatcgaggagcaccgtccctcctgctccaacggcgtcgcctgtacccgccgtctcccccccccccgcctcgtggatccccgttgcctcccacctcatgcctactataacctcggcaaggccttcgcctactggtccagtggcgttgcctttgactcaccgtcttccccgac

SEQ ID NO: 28908 - DNA, 262 bp, Zea mays
  Clone ID: LIB3180-039-P2-M2-C9
ttccaccgccgccatggcagcctccagccgccctctcgtctccgtgaaagccctggagggcgacatggtcacggacgcccccggcatcgccttgccgcccgtcttcggtgcgccgatccgcccggacgtggtccgtttcacccacaagctgctgtcctgcaacaagcgccagccttacgcagtctcccgccgcgctggccaccagacgtcggccgagtcctggggtacgggccgcgctgtgtcccgtatcccccgcgtcccc

SEQ ID NO: 28909 - DNA, 198 bp, Zea mays
  Clone ID: LIB3180-039-P2-M2-D10
tcgtttcattcgccgccgccgcctgctctctgctgccgtcgccatggggagagggcctgcgagatgctatcgccagatcaagaacaagccataccccaagtccaggtactgccgtggtgtccctgaccccaagatcaggatctacgatgttggcatgaagagaaagggtgttgatgagttcccctacttgtgtgcacc

SEQ ID NO: 28910 - DNA, 294 bp, Zea mays
  Clone ID: LIB3180-039-P2-M2-D11
tcggccaccccctagggttagggctcggttgggcatcgttccggcgtcgaccgatgcgcggcgcatggcggcggtgaactgcctctacgtcgcggctgcctctacggcggccagcgccgccgcgctgcagaggtgggcatcctcgctctttgacggcgacactggcgcgggcgaggatggagcctgtttcggagccgtgtctcggacaaagggtaccctcctggctcctgcgttaattgagctggttctctgtataccacctcatttatcttttgttgctacgggggggggggg

SEQ ID NO: 28911 - DNA, 352 bp, Zea mays
  Clone ID: LIB3180-039-P2-M2-D12
tcggcgcgggcggacaaggagcaggcggaggaggagctgtgccaagccacaatgggtatctcgcgtgactcgatgcacaagcgccgggccaccggtggaaagcagaaggcctggaggaagaagcgaaagtatgagcttggtcgccagccagccaacaccaagttgtcaagcaataagacagtgaggagggtccgtgttcgtggaggtaatgtgaaatggagggctcttcgccttgatacttggaactactcatggggaagtgaagcttgtacccgcaagagcgggatcctttactttggtttacaattgtattaaacaattgagccttgtgatggcaacaaaaccctttttt

SEQ ID NO: 28912 - DNA, 291 bp, Zea mays
  Clone ID: LIB3180-039-P2-M2-D2
tgtcactgatcagtgttgtttgctttgctttgccgtgctaatggcgcccgctccatgtggccgttcgtcgcagagggtgttccacttcggcaagggcaagagcgagggcaacaagaacatgaaggagctgctgggcggcaagggcgcgaacctggcggagatggcgagcatcgggctgtcggtgccgccggggttcacggtgtcgacggaggcgtgccagcagtaccaggaggccgggcgcgccctcccgccggggctctgggcggaggtccttgacggcctgcggggggt

SEQ ID NO: 28913 - DNA, 386 bp, Zea mays
  Clone ID: LIB3180-039-P2-M2-D3
gcaaagtaaaacctgtgcatatcgctgacggtcctggctatactaggttcaagcccaagcttgataaagtcctgcctaaagctgctggggttgtatttattgttgatgctcaggatttattgtctagcatgcaagctgctgcacagtacctttatgacattctgacaaaagcaactgtagttaagaaaaggatccctgtgcttatattctgcaacaagacggataaagttaccgcccactcgaaggaattcatcaagaaacagttggagaaagaattgaacaagcttcgggaatcaaggaacgccatatcttcagctgacatttttgatgaagtccagctcggggtccctggagaggcattcaacttcagccagtgccagaacaag

SEQ ID NO: 28914 - DNA, 261 bp, Zea mays
  Clone ID: LIB3180-039-P2-M2-D4
ttctaaagtaaaacctgtgcatattgttgatggtcctggtcatgctaggctcaagcccaagcttgatgaagtcctgcctaaagctgctggggttgtctttattgttgatgctcaggatttcttgtctagcatgcaagctgctgcagagtacctttatgacattctgacaaaagcaactgtagttaagaaaaggatccctgtgcttatattctgcaacaagacggataaagttaccgcccactcgaaggaattcattaagaa

SEQ ID NO: 28915 - DNA, 183 bp, Zea mays
  Clone ID: LIB3180-039-P2-M2-D5
tggtttcctttcccaccaccaacccccaggggggttatctccgccgccggccgctttgggaaggcgcgacgaaggcaggcgagaggctccagccggaccaggaggaaagaggagcagcagggccggaggagagatgttcctgtgggactggttctacggggagctgtcctccctcgacctgtg

SEQ ID NO: 28916 - DNA, 388 bp, Zea mays
  Clone ID: LIB3180-039-P2-M2-D6
tcgtgccattattccacagttcctcccaccaggtacttcaatgggcttcgaacacctagctgtgcaagccaacatgcaacaacaagcgcttgcggcgagcgttttacaacaaccaattgcccaattgcaacaacaatccttgccacatctaacaatacaagccatcacaacgcaacagcaacaacagttcctaccagcactgagccacctagccatggtgaaccctgccgcctacttgcaagagcagctgcttgcatccaacccacttgctctggcgaacgtagttgcaaaccagcaacaacaacagctacaacagtttctgccaacgctcagtcaactagccatggtgaacccttgcggctacgtacaacaacaacaactgctttta

SEQ ID NO: 28917 - DNA, 106 bp, Zea mays
  Clone ID: LIB3180-039-P2-M2-D8
ttcttttcacccagagcagacccggatttcggtggggcggtcaatggggttggggggttgtctaataagttttatcctatccgctttttaagtctttatattattt

SEQ ID NO: 28918 - DNA, 204 bp, Zea mays
  Clone ID: LIB3180-039-P2-M2-D9
tctgtaagtcgggttctggtgacagctcagaggaaagatgtagctgcagcgatgggcgctaaggagcaaatcccgattccggatatggaagagaagcagtacttttcgatgttcatgcactacgccctataaggcaagccttttggtgactgaaggtttatagaatattggagaaaaattctaaaaaagctctgatgatctccc

SEQ ID NO: 28919 - DNA, 388 bp, Zea mays
  Clone ID: LIB3180-039-P2-M2-E1
ggaaactacagaaaagggaccaaatcgaatccgtggtgcactgcccctccccctccctcacaagccgccgccgccgtgaggactccggcgaatggcgtcccgcgtcgcctcgggcctcctccgccgccgcgccgtcgccactctagggctactaaggagtcatacacatgtcagaaactacagcagtcaactttcagctttgattccagctacttctcaatgctcaaatctgacaagaagacgctattacttacctaatccatctctgtaccaagtttggagtaggtcatttgcctcagacagcggagacaagttcgaggctgttgtgcccttcatgggtgaatctgtaactgatggaactcttgctaacttcttaaagaagcctgga

SEQ ID NO: 28920 - DNA, 150 bp, Zea mays
  Clone ID: LIB3180-039-P2-M2-E10
gaaatctgacccgggccacactccgcgggtccgccatggcgatccggtccaaggcctggatctcgctgctgctcgcgctgaccgtcgctctctccgcccgggcggaggaggagcccgccgccgcggcggagggctaggccgtgctcaccc

SEQ ID NO: 28921 - DNA, 82 bp, Zea mays
  Clone ID: LIB3180-039-P2-M2-E11
ctagttctagatcgcgaccgccccccctttttttttttttttttgtgtccctttttttttattttttttttttattttttaa

SEQ ID NO: 28922 - DNA, 293 bp, Zea mays
  Clone ID: LIB3180-039-P2-M2-E12
caggacctcacacgcacaggtccgatttcttaccgttaacgagacctaaccacaccaacggagcactggccatggtaatacgtacttaccagtatcaatgcccctgcgaaacatacttcattatgccaccgaagcatacaaaccaggagctgccgctttaccactctgactagtccagagtcctgctgacataggtgggccaacattaagtttgcctttcttgtcgacattattgttttgaccataacaacccacactactgtaacatgcgggcacgaaccttaaacttttgt

SEQ ID NO: 28923 - DNA, 387 bp, Zea mays
  Clone ID: LIB3180-039-P2-M2-E2
gccgccgacaactctctctaccgtccgagaccccaagcaccaccgcggcggcggcgaccatggctgtcggaaagaacaagaggatctccaagggaaagaagggcggcaagaaaaagaccgtcgaccctttctctaagaaggattggtatgacatcaaggcaccgtcggtgttcagtgtgcgcaacatcgggaagactctcgtatccaggacacagggtaccaggattgcttctgagggtctgaagcacagagtctttgaggtttgcctagctgatcttcagggcgacgaggatcaagcttacaggaaaatcaggctccgtgctgaagatgtgcagggcaggaatgtgctcacaaacttttggggtatgaattttaccactgacaaac

SEQ ID NO: 28924 - DNA, 262 bp, Zea mays
  Clone ID: LIB3180-039-P2-M2-E3
ttataagtgacagtgccttaatgtatgtcaaaggggatgacaagaagcttgccatgggaacgctctttatcgacaaatacccacagatacaattcgatttggttttcaataaagagtttgagctgtcacacacatcgaaaactaccagtgtatttttctctggttacaaggttgagcagccaattgagggagatgaaatggatcttgattctgaggatgaagaggaggagctaaacattccagtaatcaaggaaaattgcaa

SEQ ID NO: 28925 - DNA, 291 bp, Zea mays
  Clone ID: LIB3180-039-P2-M2-E4
tttttccaatcccgagcagtggtgcgaaaccgggagcgctcgcgccggtgacgcagtaacaaagaggaagccgcggtagcactggtagcggcagcagtaagggggagatgtcgtcggcgttcagcggcgatgagaccgccccttttttcggcttccttggcgcctccgctgcgctcgttttttcatgcatgggggcggcgtacgggacagccaagagtggcgtcggcgtggcgtccatggctgttatgcgctcatagctcttcattaatttcattattgcggggggggggg

SEQ ID NO: 28926 - DNA, 150 bp, Zea mays
  Clone ID: LIB3180-039-P2-M2-E6
tttcaattgattccttagccaataacaaagccgtgagtgttagctttatcgaggggggtagtaagttcacttggatttacttgcttcgttacaaatctgaagtcttcacatttctttaaagaatttcagtgccttttttaatctattttt

SEQ ID NO: 28927 - DNA, 150 bp, Zea mays
  Clone ID: LIB3180-039-P2-M2-E7
tctttccaccctccgccgccggcgtttgggcgggacccaaccaaaccctggagccgccgaactcagttccggtgagaccctcctttccagcgaaaatgccgaacctcgagtgccggatgtatgagcagcggttcccggaggtgtacgcct

SEQ ID NO: 28928 - DNA, 330 bp, Zea mays
  Clone ID: LIB3180-039-P2-M2-E9
tcttgaagaaggttggatacaaccctgataggagctacttcgttccaatctggggttttgaaggtgacaacatgattgagaggtccaccaaccttgactggtacaagggcccaaccctacttgaggctttggacttgatcaatgagccaaagaggccttcagacaagcccctgcgttttccccttcaggatgtgtacaagattggtggtattggaactgtccctgttggacgtgtttatactggtgttattaatccttatatgttttattctggggggggggggggggcgtatttctttaatttattccttttttcttctctccattctt

SEQ ID NO: 28929 - DNA, 273 bp, Zea mays
  Clone ID: LIB3180-039-P2-M2-F1
ttcgttttctaccagttgcttcgtctcgctttcatcctctccgcgtcactggggtttcgtcggtgtcaaggactccgcttccgcccgaagacttcgccttccgcccgaagacttcgccttctcttggcttgctcaccagctgcgtctctttggttagatacgtttttctcctttgtctttcgtcgtccctttcgattcgatcgatacctggatccagatccattcggggatcatatccagcttcctttacttgagatcctcttgctttttgga

SEQ ID NO: 28930 - DNA, 358 bp, Zea mays
  Clone ID: LIB3180-039-P2-M2-F10
tttcggcagggtaacgaagcaccatctcctctcgcttgcccttcttcgattaggggggatcccagccgccgtcgctgcagtcaggcatggcatcaaccgttaccttcaacccagtgagcgcccaagctgcgctgatccaaaagccaaggaaccttggagccataagctatgctggcttaaagatgccggcatctgttagctctggctcagagtcgtcattcctgggctggaatgcatcccttcgggcagctgttactccaaggattgtgcccaaggcaaagtctggatctcagatatctccacaggcattttacaaggtggcagtgctgggtgctgccgggggcatcggtcaaccctt

SEQ ID NO: 28931 - DNA, 287 bp, Zea mays
  Clone ID: LIB3180-039-P2-M2-F11
tcgaacgactttcccatgacaaattcaactgatatcgaagaaggatggggggcgagctagcaaaatacaagagacctttacttatccatgcagaacgtatacctgaggctgaggatcatgatttgcaagacgatgaattagatcctcggtcctatatgacgtatctgaagtctagaccaccatcatgggaggaagcggctatcagagatctgcaacgtgcaatgaaggatacggagttggggggtcggtcttaaggagtttttatttacaattgatgatgggggggg

SEQ ID NO: 28932 - DNA, 401 bp, Zea mays
  Clone ID: LIB3180-039-P2-M2-F12
ctgagacaaagtttggaccatgatattgcgccagctattgctcatttcttaaactgtttcgttgggaaagttttaggtgcttccacgaagagtagtcttagcaacgcacagtccaaaactctgaagggtcatgaaaatagccaaactcaaaagtctactaaaggccctaaactgagccatgctgccgcttcaagaaaaagcttatcaacttattttcatctaacctctgatggaatttggtttagcattaaggaatttgcaaaatcaaaatatcagtttgaagtgccagatgaagctaggctttcagccaaaagggtagctgttctccgcaacctatgccgaaaggtaggaataacaattgctgcacgaaaatatgatatggatgcttcaagtccatttga

SEQ ID NO: 28933 - DNA, 335 bp, Zea mays
  Clone ID: LIB3180-039-P2-M2-F2
tcctaagatcctcattgttaccaggctgttgcctgatgctgatgggactacgtgcggtcagcggttggagaaggtcattggtactgagcacacagacatcattcgcgttccgttcagaaatgagaatggcatcctccgcaagtggatctctcgttttgatgtctggccatacctggagacatacactgaggatgtttccagtgaaataatgaaagaaatgcaggccaagcctgaccttatcattggcaactacagcgatggcaacctagtcgccactctgttggcgcacaagttgggagtcactcagtgtaccatcgcttatgccttggagaaaa

SEQ ID NO: 28934 - DNA, 180 bp, Zea mays
  Clone ID: LIB3180-039-P2-M2-F3
tgctctcggtttagcgccttctacggtcaagcggcggctgtgggtgccatacaccaccgttttatctaccgcctccggtctatatgccgcctccgttctatctgccgccgcagcagcagccgcagccatggcaataccccactcaaccaccgcagttaatcccgtgcccgcagtttggat

SEQ ID NO: 28935 - DNA, 240 bp, Zea mays
  Clone ID: LIB3180-039-P2-M2-F5
tctgatgggaccaaaaatgagtggggatggggcgggcaaaagcttggtgctagggcgattctgactgtgtcattagctgtttgcaaagctggggctagcatcaagaggattcctttataccagcacattgccaacctagctgttaacaagcagttagtgttgcctgtccctgcattcaatgtcatcaacggtggttcccatgctgaaaacaagcttgttatgcaggaggttatgatcctt

SEQ ID NO: 28936 - DNA, 145 bp, Zea mays
  Clone ID: LIB3180-039-P2-M2-F6
tctgttcgccggcgaggacttttattatatcctgcgttttctgaacaccaacgggggtggtaagcataaaatcattttctccattaccttaatcaagggtgtttttcctcctttctctaacatctgttgctatatcctctttttt

SEQ ID NO: 28937 - DNA, 244 bp, Zea mays
  Clone ID: LIB3180-039-P2-M2-F7
tttctcggtccgtccggccccgaccccatcgggcagattttccagggccccggggtgtgaatcaagatcacgtccaaccccaccacacgcgcctaccttaacgagcccgactttatgcaaatgctgcgcgaagtgcaaaggaacccctacagcatcagcatgtacctttccgatccccgcatgatgcaggtatctatccttatgcttaatgtcaagatccatataccttatgcctttttaccat

SEQ ID NO: 28938 - DNA, 217 bp, Zea mays
  Clone ID: LIB3180-039-P2-M2-F8
tctatccacgcgaccgcgagagctctcagagggccctagcacgcaaaaacgccacgagagagacgaatcttccgaatctctcggtggcgatggcgctctccgaccgttcccgcgagtcgctcctcccgagcttcctctacggctcctcggcgcgctctttcgctgccacaggagccgccgcgcgcctccttgtcttcttcccggcgcctgccgcggt

SEQ ID NO: 28939 - DNA, 191 bp, Zea mays
  Clone ID: LIB3180-039-P2-M2-F9
gaaagagggacgaatggcgagctctcagggctgcgataacccgccgggcctgaacccggcctgcggggagggcaaggtcgtcgacagcttcggcgggttcaaggcctacgtcgccggccccgaggactccaaggccgccgtcgtcctcgtcgccgacgtctttggattcgaagcgccgattatgaggaaga

SEQ ID NO: 28940 - DNA, 138 bp, Zea mays
  Clone ID: LIB3180-039-P2-M2-G10
gccatcgttgagagcgacccgctgaactggggcgcggcggcggcggagcgggcggggagccacctggacgaggtgaagcgcatggtggcgcaggcccggcagccggtggtgaagatcgagggtttaacgctttgtgtt

SEQ ID NO: 28941 - DNA, 140 bp, Zea mays
  unsure at all n locations
  Clone ID: LIB3180-039-P2-M2-G11
tctttttnggacgcatgtttctttatttcttttcgccactattctaaactgcggccgctctnnnnaaccccacttcctaccatttttctcattctttccctctctttaaaatataatcttctttctcaccatacactatt

SEQ ID NO: 28942 - DNA, 355 bp, Zea mays
  Clone ID: LIB3180-039-P2-M2-G12
tcgcagaaacacaccaagcgaagcacattagcaacaacctaacaacaatggctaccaagatattatccctccttgcgcttcttgcgctttttgcgagcgcaacaaatgcgttcattattccacaatgctcacttgctccaagttccattattacacagttcctcccaccagttacttcaatgggcttcgaacacccagctgtgcaagcctataggctacaacaagcaattgcggcgagcgtcttacaacaaccaatttcccagttgcaacaacaatccttggcacatctaacaatacaaaccatcgcaacgcaacagcaacaacaattcctaccagcactgagccacctagccat

SEQ ID NO: 28943 - DNA, 379 bp, Zea mays
  Clone ID: LIB3180-039-P2-M2-G2
ttgattgcgagcgttccccttccgtccgctgcattcctgctctatggctcgccgggctctcagaccacagttgccgccgccgccgccctaagccagggtgctgaggctttcgttggcctcttcgccggcagcgagcacccaccagcagttctgtagaaatggctgatggtgaggacatccagcctcttgtctgcgacaatggcaccggaatggtcaaggctggttttgccggcgatgatgcaccaagggctgtattccctagcatcgttgggcgtcctcgtcacaccggtgtcatggtagggatgggtctatactgttgcatttgtttttgattagtcacattttaagataggtttcttatcgtcctattctctctttt

SEQ ID NO: 28944 - DNA, 251 bp, Zea mays
  Clone ID: LIB3180-039-P2-M2-G3
tttgtcactgatcagtgttgtttgctttgctgggccgtgctaatggcgcccgctccatgtggccgttcgtcgcagagggtgttccacttcggcaagggcaagagcgagggcaacaagaacatgaaggagctgctgggcggcaagggcgcgaacctggcggagatggcgagcatcgggctgtcggtgccgccggggttcacggtgtcgacggaggcgtgccatcaataccaggaggccgggcgcgccctttc

SEQ ID NO: 28945 - DNA, 368 bp, Zea mays
  unsure at all n locations
  Clone ID: LIB3180-039-P2-M2-G5
ttcaactgaagattataatgacattgggcgggttctatagaagatgcaggaggttctataggtaattttactgcccatgacacataaagaccggttccagaagttgggtattcgtcctccaaaaggggttctattgtacggaccaccaggaactggcaagacactcatggctcgtgcatgtgctgcacagacgaatgcaacgtttcttaaattatctgttccacaacttgtgcagatgtttattgcttattgatcaatttttttccttaatnnattttttggttcttaaaatttatattatttttataaaatttattatatagtttttgttccattttttttttctcctttttatttattatctcata

SEQ ID NO: 28946 - DNA, 349 bp, Zea mays
  Clone ID: LIB3180-039-P2-M2-G8
tctattcgattcctttgcaatcagcaggcctggagtcccctatgatgcccgccgactcagtttcatctgcaaaatggggtcctttgcaagcaagaggcacgaaagcgaggacgcccattcctttggcgttaccatctgtggatccaagttcactaataaaccataaagtttatacaaggtggccagaagacaacaacttctatgaggccaccataacacgatataaccctgtgacgggtgagcatggacttgtttatgacatgggcacacaagccgagagttgggaattcagtttaactttgtgatttggcacctgaagatataagatggggattttgtggaccccttt

SEQ ID NO: 28947 - DNA, 219 bp, Zea mays
  Clone ID: LIB3180-039-P2-M2-G9
ggaccagcaagaccagattaagccgctgggatcaccgcagcaacagctggcggcggcgctgcccggtctggcaggcggtgtttctgcggcgtccggccaaggcgcgccgccggcgcagtcaccgcccaagaagaagaggactttgcctgaccccgacgctgaggtgatcgcgctgtctcccaatacgcttttggctactcaacaggttcttgtgcgagg

SEQ ID NO: 28948 - DNA, 318 bp, Zea mays
  unsure at all n locations
  Clone ID: LIB3180-039-P2-M2-H1
tcacatcgttgtccaaacaagagcggcgcggcggacggcggcctagctcgccgggctaacgaggccagatattccttaacctagctagctaacagctgactagatagatcgatccatcagctggcagccatgaatatgatcagggcagtacggcgccggttcaccgtcggccacctggctacggccaaggaccccgccacgctgcgccacgcggccgccgagctcctcgccaccgccatcttcgtcttcgccgccgagggcgccacgctctctctcgggaggatgcaccaccatgacaagggcggnggcggcctggcg

SEQ ID NO: 28949 - DNA, 413 bp, Zea mays
  Clone ID: LIB3180-039-P2-M2-H10
tcgcaagaaggtgactcctgaggtgatggcggagtacaccgtccgtacggtgggaggaccgtccctgctgctgtgcctgctgttgtcttcctctctggtggacagagcgaggaggaggccacccgcaacctcaatgccatgaacaagctcagcaccaagaagccgtggtccctgtctttctccttcggccgtgccctccaggcgagcaccctcaaggcctgggctggcaaggtggagaacttggagaaggctagagctgccttcctcgccaggtgcaaggccaactctgaggctaccctcggcacctacaagggtgatgctgccgccgacaccgagagcctccacgtcaaggactacaagtactgagttgcttctttttgcgtgcccgttttggaactcctgcctacgagcta

SEQ ID NO: 28950 - DNA, 422 bp, Zea mays
  Clone ID: LIB3180-039-P2-M2-H11
cggacgcgtgggcaaatgtcctcatggaagtccaaagatctttacaggagaatgcattgcgtgttgaggatctcccaaccaacccgtcttctcaatctgcatcacaccctccagagtcctctcaagacattagttcacaatctttgtcttctgaaatggcaattggaggaccaggtggactatggcattttatatataaaagcatttaccttgaccagtttgtgtcatcagaatttccctcacccataagtaacaaaaagcagaagaagggattgtacaaagcttaccaaaaattgtatgcatccatgcatgataaagcaactggtccacacaaaactcaattcagaagagatgaggattatgttctattttgctggataacccaggatttcgaactatatgcagcctttaatccactggct

SEQ ID NO: 28951 - DNA, 300 bp, Zea mays
  Clone ID: LIB3180-039-P2-M2-H12
cccttcccagttctgtccctctcgaacgctaactccaaaaaccctggctggcctctcatggccgccgccgcagctgacgacgcagccgaggtggagcggctttacgagctcggcgagcgcctctcctccgccaatgacaagtccgagcatgcggcggactacgaggcgattattgcagcggtgaagggacagagtgccaaggcgaagcagctcgcagcgcagcttatccccaggttcttccggagcttccctgcactcggcacgcgcgccatgtcagccatgttcgatctcgtcgatatg

SEQ ID NO: 28952 - DNA, 309 bp, Zea mays
  Clone ID: LIB3180-039-P2-M2-H2
tcttttacgccagaggaagagagaaaaccccagggcctcctcacctattccggcttgcctcttcccccttcctagtatagacaatcatcaatctgtgagattggcgagcgaatcacgcatacaactgtaggatggagcggggaatgaatgcctcccctgattgcagttaatccttcccattccagtccgttcctcgtccactggagtccgttgaagtacaggctgcattaggacagggagcaaccgccaccatagctgttcgccatttcttccatcaacaccaacatgagcagtaacaaggaaagggcc

SEQ ID NO: 28953 - DNA, 173 bp, Zea mays
  Clone ID: LIB3180-039-P2-M2-H3
cccaaatttccgggttgacaccacacccttctttttcattaaaagtaacacaactttttaacgtgcgacctaacccttaattgcctgggtttgttcattaccttggtttggttctttgaagccatcttattaaaaccccacccatttttaatcttttgaccaactgttttgaa

SEQ ID NO: 28954 - DNA, 394 bp, Zea mays
  Clone ID: LIB3180-039-P2-M2-H4
gttagatagatcagccctatctttgccgggggccggacgactcggcgcaggggcgcagctttctctcgatctttcgcgcttcctccttttgacgcttgctccgcatggggttcctggagatctttggggcggttcgctcctgacatggttcagccgcatcacgcgctgctgcgactcttaacagttcttccgatccgtccagcccagcacatggacggcccgccctgctatggtggacatactggagaaggctacagctgccttcctcgccaggggcaaggccaactataaggctaccctcgggacctacaagggtgatgcttccgcccacacccagagcctccacgttaaggactacaagtactgagttgcttttctttgctgcccgttttgg

SEQ ID NO: 28955 - DNA, 165 bp, Zea mays
  Clone ID: LIB3180-039-P2-M2-H5
tttttattatcttccttccaaccctttatcttatcttgcatcacaccctccaaagtcctctcaaaacattaattcacaatctttctcttctgaaaaccaccctcccctcccccatttctttttcctccctttcttctatcccccttttcctcccctttctttctt

SEQ ID NO: 28956 - DNA, 327 bp, Zea mays
  Clone ID: LIB3180-039-P2-M2-H6
cgcctgacctacccgtacttaattcctggatccacccattcgtgctgctttgctgccgtggcccgtgcgggggagttagttcaggaacccgggcgggacatcccctcttcctccccggccggcgatgtcgtcttcgtcttccgcgctggccaaaggcaagtcggcaatcggatccccaatctcatctgccaaattccaggccactacgaaattattcttctactccttcacaggtcagagtgctaacccgaatcaaatcacaccgcactttatccccaggttctttcggagcttccctgcactcgaaacgcactccatgtcagccat

SEQ ID NO: 28957 - DNA, 290 bp, Zea mays
  Clone ID: LIB3180-039-P2-M2-H7
ttagccatttgaaccccccacgtctcctcgcgtcgttccccatttgctgggtcgccttgcccaccccgccattcgccgtttgcccctcgtctccgcaccgcgcgctgttgtccatccttgtgcagcaaaaatgacggctggctacattgttggctcactggtcggatcctttgccattgcatacctgtgtgacacatttatctctgacaagaaggcatttggaggtagcacccccaagactgtttctgagaaggagtggtggcaagccacagacaccaagttccaggcct

SEQ ID NO: 28958 - DNA, 401 bp, Zea mays
  unsure at all n locations
  Clone ID: LIB3180-039-P2-M2-H8
ttttggaacacttctggcaccgncttgctcgtcactattaacaacaacgccgcagataaaaaactttattnttaattccttnttaactctaaaggttagtatttttttttnttttttttaccgggttttattttttttttttttaatnnntatatgtaaaaaattttcaanattttataataatttgcctcttttttttcttcttttaaataaatcttttttttttttcttttacttttatttttttattcttttttttaattttttctgtttagtagtaggcgggtctgggttatctttattttttctatttttttattatctctttttttcttctttatattatatttttatattatttttttttttattttatttttttttttatttatatttctttt

SEQ ID NO: 28959 - DNA, 408 bp, Zea mays
  Clone ID: LIB3180-040-P2-M2-A10
gctaactacccccgcgctggttcgccaccaccgccgcagcaggcgtgggaatctgggcagcgccccgcggagaagaggaggcagcgcgctctccgtccgccatggcgggctcttccgaccccgacaggctcatgagcaaagccgacaaactaacaaaattgagttttacaagatggaatgctgattggaaaagcgctacctccttgtatgagcaagctgcaattgcgtataggttcagaagggacattgagaaagcaaaagatgcttttgagaaggcctcaaaaggacaggaaatgatctcctcaccatgggacgctgttaagcatatggaatctgctgctgctttagcaaaggagcttgggcgctggaatgaagtatctgatttctatcacagagcttcagaattat

SEQ ID NO: 28960 - DNA, 417 bp, Zea mays
  Clone ID: LIB3180-040-P2-M2-A11
accgaattccctgcgattcctctcccctcgcctcctcgtctccccctaggggatcgtcggagaggaatcgcaaagagggccgtctcatccgagttaaggaagccatggagcacaaggaggctgggtgccaggcccccgagggacccatcctctgcatcaataactgtggcttcttcggcagcgcggcgaccatgaacatgtgctctaagtgccacaaggagatgataacgaagcaggatcaggccaagctggctgcctcctctatcgacagcatcgtgaacggcagcgacgccgtcatggagctcgttgttgctggcagcaacacggtagtagctgttgcccaagtcgagttgcaaacaatgaacgtgcagcagcccgctgatgttgccggacccagcgagggggtggcggcgatct

SEQ ID NO: 28961 - DNA, 368 bp, Zea mays
  Clone ID: LIB3180-040-P2-M2-A2
tttgctatctaaatcactgttaccaggaatggtagaacttgcagaggataggcactggagagtccggcttgcaataattgagtacatcccattgttggcgagtcaattaggtgttgggtttttcgatgacaagctgggggcgctctgcatgcaatggttggaagacaaggtcttttcaatcagagatgctgccgctaacaacttgaagcgccttgcagaagagtttggtccagagtgggcaatgcagcatataatccctcaggtgctggtgaagatcaacaacccacactatttataccgcatgacgattctgcaggcaatgtccttgctagctcttgtcatgggtgcagagattacctggcaaaagc

SEQ ID NO: 28962 - DNA, 350 bp, Zea mays
  Clone ID: LIB3180-040-P2-M2-A3
ctggtttgacccaacgagccccaggggagccaggaaaaggagccgtcaaaagccgccgccgaggagagcgcgcaggtcaggcatggcatcaaccgttaccttcaacccagtgagcgcccaagctgcgctgatccaaaagccaaggaaccttggagccataagctatgctggcttaaagatgccggcatctgttagctctggctcagagtcgtcattcctgggctggaatgcatcccttcgggcagctgttactccaaggattgtgcccaaggcaaagtctggatcttagatatctccacaggcattttacaaggtggcagtgctgggtgctgccggtggcattggtcaac

SEQ ID NO: 28963 - DNA, 295 bp, Zea mays
  Clone ID: LIB3180-040-P2-M2-A4
gccattctcaattttttgttaccaggaactcgtcgccaaaagtattgagtcttccgacctcaacttctcacgttacggtgacaccttttttgaggtggtttttgttggaggacgcactcagcctggcactgtaaaacctgaagaaggagaccgccacccttattctatgttagattgtgtggcacaacgtgaaacaattttgcctttcgtactctatatccagaaaacattgcgcaggaggcctttcttaataaaaaatcttgaaaatgttatgcgcaaattcctccaatccttg

SEQ ID NO: 28964 - DNA, 457 bp, Zea mays
  Clone ID: LIB3180-040-P2-M2-A5
gtaacatagaaagtggaatccagtagcaccagtagagcaacaatggagaccaagatattttccctccttatgctccttgctctttctacatgtgttgctaacgcgacaattttccctcaatgctcacaagctcctatagcttccctttttcccccataccttccatcaattatagcttcagtatgtgaaaacccagctcttcaaccatataggcttcaacaagcaatcgcagcaagcaacatacctttatcgcccttgttgtgtcaacaatcgccagccctatctttggtgcagtcattggtacaaaccatcagggcacaacagctgcagcaactcgtgctacctgtgatcaaccaagtagctctggcaaacctttctccctactctccgcaacaacaatttcttccattcaaccaactgtctacactgaacccttgtgttaattgcagcaacaact

SEQ ID NO: 28965 - DNA, 228 bp, Zea mays
  Clone ID: LIB3180-040-P2-M2-A6
cacgaacaccataacgcttaacgcggcggtcatggtgggcggcggcggcgacccaaggccggaggacgagcccttctccgacggagacgccacggagtcggacaccgacgagtctcctccgcaggggattagtgctcgccgccccggcgccaccaccaacccgatcctgactcgcctggcggtgtcgcggaacccgagcccgatggccgtgggcaccaagacccaagg

SEQ ID NO: 28966 - DNA, 175 bp, Zea mays
  unsure at all n locations
  Clone ID: LIB3180-040-P2-M2-A7
gcgccctgtcccgttggccgcgaatggttctcgcgcgagtcctcccgctgcccgccccgtcgtccgcgccccaccgccgtttactcctgccgactcaggcggngccggccccgccgcgtgtgcttaccgtgcgggccgtcgcctgccgtgcagcgaacgccatggcgggcgttgc

SEQ ID NO: 28967 - DNA, 186 bp, Zea mays
  Clone ID: LIB3180-040-P2-M2-A8
cacgcacgaaagagacactccggcctgaggtagagcgttaatccctgaaccccactagtagagattcggctgttggcatcctgtccggcccccgtcacaatgtcccaatcacagccgctgcctgcagaacgcgtaacgccacgccacctttccccagggtccggcgatgtcggcgccctccgacgc

SEQ ID NO: 28968 - DNA, 447 bp, Zea mays
  Clone ID: LIB3180-040-P2-M2-A9
gagaccaactagcaacatagaaagcacaatagtgtaccaacaatggcagccaaaatattttgcttccttatgctccttggtctttctgcaagtgctgctaccgcaaccattttcccacaatgctcacaagctcctatagcttcctttcttcccccatacctctcaccagcggtgtcttcagtatgtgaaaacccaattcttcaaccctacaggatccaacaggcaatcgcagcaggcatcttacctttatcacccttgttcctccaacaaccgtcagccctattacagcagttacctttggtgcatttgttggcacaaaacatcaaggcacaacaactacaacaacttgtgctaggaaaccttgctgcctactctcagcaacagcagtttcttccattcaaccaactggctgcattgaactctgctgcttatttgcaacaacaacta

SEQ ID NO: 28969 - DNA, 260 bp, Zea mays
  Clone ID: LIB3180-040-P2-M2-B1
cttcctctccacttgcaacctgtccctgagaggcccgcggcgtctccgcttggccttaccacccaccaccaccttctcatccagcagctttctcctttgctgcccctcccctttgccgcggtcagggctgtgcagcccccgcgttgcattggggtcccgtgccgatcgccaggccgcgtgatccacccgtgctcgagcaagcgcctcgcgctcctcttcttcatcttcgttgcggccacctttgccttctgggaccgcca

SEQ ID NO: 28970 - DNA, 450 bp, Zea mays
  Clone ID: LIB3180-040-P2-M2-B10
gtcgacgacctgcctactacttacttactgtacctgtgcagctgtgcccctgtgccaaccatcaatcaatctgacgcaattccgatcggtttttgcagctgtgaacggcaagggcttcatcgcgcgggacctgacgttcgagaacacggcggggccggcgaagcaccaggccgtggcgctgcggtgcgactcggacctctccgtcttctaccgctgcgccttcgaggggtaccaggacacgctgtacgcgcactcgctgcgccagttctaccgcgactgccgcgtcgcgggcaccgtcgacttcgtcttcggcaacgccgccgccgtgttccaggactgcgcgctcctcgcgcgccgcccgctgtccggccagaagaactccgttaccgtgcagggccggtttgacgccaacatgaccacgggcttcgccttccagttttgtaacgtctt

SEQ ID NO: 28971 - DNA, 427 bp, Zea mays
  Clone ID: LIB3180-040-P2-M2-B11
ttcctcgccgcctcacccgtctcctcctccgcagcttccccgcgatcccgaccatggagggcgacggtaccaaccttgatgcggcgatagagtcgctcctgaatgtcgagaagcagatgaggctggccggagatgtcgccggcactcggaaggccgtcatcgacatcgtcgagctctgctacaaggccggcgcgtggaagacgctaaacgaccagatcgttctcctatctaagaggagaggccagcttaagcaggctattactgctatggttcagaaagcaatggagtacattaatttgacaccaggcattgacacaagcatcgagctaataaaaacactgggcagtgtctctgctggcaaaatctatgttgagatagagagagcaagattgatcaaaaggcttgcaaaaattaaagaggagcaggg

SEQ ID NO: 28972 - DNA, 417 bp, Zea mays
  Clone ID: LIB3180-040-P2-M2-B2
ggcggccaaagcagcggcccccttatctccagggaccaggggaggtcgcacaccaacgcaccgtccttccctttcctcctcctcctccctctcctcggaaggtcaagtgacggtatttgtgaccatggcagggaccttactccagtcagttgccctgggaacaccatttgggggtcgcatgagaacccattgttggaggtcccatggcaccaggaggcctgcctctatgttggcagtgtcacttagccgccctgtcaagatgtcagcatttgtgggtctaagatcagtgcatagcttctcggtcacaccgacggtgtccaattccaggtcggcagttgcatcttacaggtcatcgcgacagacaagacgatctcgttttgtcactcgggcaatgtttgagaggttcacggagaaagc

SEQ ID NO: 28973 - DNA, 289 bp, Zea mays
  Clone ID: LIB3180-040-P2-M2-B4
caagattcaatgggttaaatctggggacagggctgttaacatatcattagatgaactaagagaaggactgttctagctatagtgaaagatgtcaggagtatgcttctcgcttgacgcaagtttgagtatgtttgtgcttcttagtctcagcactactagtattagagtgatgcttgcgtacccctctggctgggttttcattcgtttgaactctagcttatattgccaaatttacttatctgcagaatatttgagccctcaatgaaacatctctgtgtaatttactgct

SEQ ID NO: 28974 - DNA, 435 bp, Zea mays
  Clone ID: LIB3180-040-P2-M2-B5
ctctcgcctcggcttggcagtcggcactccctctccaccgcgctgcaggggcgacgcaaggccgagcgctcctcgatccagatccaaggtaggagatggctctcacgagaattggcctcgccggcctcgcggtcatgggacagaaccttgccctcaacatcgcggagaaagggttccccatctcggtctacaacaggacgacctccaaggttgatgagaccgtgcagcgtgccaaggtcgaaggaaacctccccgtgtttggtttccacgaccccgcgtccttcgtgagctccatccagaagccccgggtcgtcatcatgctcgtcaaggctggggcgccggtggaccagaccattgccacgctcgcggcgcaccttgatcagggggactgtatcgtcgatggtggcaacgagtggtacgagaacacggatagga

SEQ ID NO: 28975 - DNA, 214 bp, Zea mays
  Clone ID: LIB3180-040-P2-M2-B6
ctactatgtctactttatgttgtcctaatggttgtagacaccaccaaacttaggcatcaatagatccagcacctccttactcgaaggcccactggttctccctgcggatctcctcttcctcctcaggggtgaagtcattcttgatattgaaggtcttgcgaatctcttctggtgtcttgcccttgatcatgtcagcaacagtctgacaggtcat

SEQ ID NO: 28976 - DNA, 356 bp, Zea mays
  Clone ID: LIB3180-040-P2-M2-B7
catccgttggatttcaccactaactgtggtaagatcaggttctactgctgggataccgcagggcaagagaagtttggtggcctcagggatggatactatatccatggccagtgtgcgatcatcatgtttgatgtaacctcaaggcttacttacaagaatgttcctacgtggcatagggacctgtgcagggtctgtgaaaacatccccattgtcctctgcggtaataaggttgatgtgaagaacaagcaggtcaaagccaagcaggttactttccacaggaagaagaatctgcagtactatgaaatttctgccaagagcaactacaactttgagaaaccttttctgtacctcgcaag

SEQ ID NO: 28977 - DNA, 449 bp, Zea mays
  Clone ID: LIB3180-040-P2-M2-B8
tgttttctatcctgctggatatgtagtcatgacagttaaattatgtacaactatgattacaaacgggaatacaagctaggagttgagaccacaatccttatgaaaagttacactgtaagtatgtcgtcctgcttgcatttcttccatgttccttttctcactgtaagcttagtttttgtgatcagcttccagatagaagagttattaaagtagacactaaacgattccaacctcctgaatctctttttactcctgtaacacttccatttatatttatacataatggtattgtcaacagtacacatagtttccatcagtttgttaatagtgcacctttagattgaatgagcttcttgcagagcaccaaggattaggcattgaaatgtgtggataaaaatattagaggaccacacatcattattatgcaacattgtctatgcacatgaaca

SEQ ID NO: 28978 - DNA, 375 bp, Zea mays
  Clone ID: LIB3180-040-P2-M2-B9
ctgtgtgcaaagctggagctatggtgaagaagattcctctttaccagcacatcgcaaatcttgctgggaacaaaactctggtgctccctgtacctgcctttaatgtgattaatggagggtcacatgctggaaacaagcttgccatgcaggagttcatgatcctcccaactggtgcctcctcgttcaaggaggccatgaagatgggagttgaggtgtaccacaacctgaagagcataatcaagaagaagtacggtcaggatgcgacaaatgttggggatgaaggtggttttgcacctaacattcaggaaaacaaagaaggccttgaactattgaaggcagccatagaaaaggctggctacactggaaaggtggtca

SEQ ID NO: 28979 - DNA, 427 bp, Zea mays
  unsure at all n locations
  Clone ID: LIB3180-040-P2-M2-C1
ccctgctgtctccctccctccttccttccttccccgccactgcgcagcgcgagtgcggcgacagccagtcacacactcccactccctcgaccgctctcggccctcggccccgtccgcgtcgccgcagggcgaggaggcaatggcggcgggcgggaatggcgccggcggggacaccagggcggccttcgcgcggatctacaagacgctcaaggaggagctgctcaccgacccggccttcgagttcaccgaggagtcacgccagtggatcgaccgcatggttgactacaatgtactcggaggcaagtgtaaccgtgggctctctgtggtcgacagctacaagctgctcaagggcgctgatgctctgggcgaggaggaaacgttccttgcttgcaccctcggctggtgcattgaatggctncaggctttc

SEQ ID NO: 28980 - DNA, 184 bp, Zea mays
  Clone ID: LIB3180-040-P2-M2-C10
gtgatacgagcgagttgtcttcttcccccccggagaaaagtgcttccgagaataaatttttttccatcggaatgtctgaaactatgttgggtgtatcctagtggttggttgagcattaatggctcatattttgtcaggtctatgtgtcgccgtgaaacttttaatcaaatcagttcactctttc

SEQ ID NO: 28981 - DNA, 439 bp, Zea mays
  Clone ID: LIB3180-040-P2-M2-C11
agcgaagctacctagcaacgacttaacaacaatggctaccaagatattagccctccttgcgcttcttgccctttttgtgagcgcaacaaatgcgttcattattccacaatgctcacttgctcctagtgccattataccacagttcctccgaccagttacttcaatgggcttcgaacacctagctgtgcaagcctacaggctacaacaagcgcttgcggcgagcgtcttacaacaaccaattaaccaattgcaacaacaatccttggcacatctaaccatacaaaccatcgcaacacaacagcaacaacagttcctaccagcactgagccaactagatgtggtgaaccctgtcgcctacttgcaacagcaggtgcttgcatccaacccacttgctctggcaaacgtagctgcataccaacaacaacaacaattgcaacag

SEQ ID NO: 28982 - DNA, 392 bp, Zea mays
  Clone ID: LIB3180-040-P2-M2-C12
aacacacggcttccacagcttgctctcgctgcactcgcaagcaatacatctcgtcgttccactaagatcgaggagcaaatggcggccaccttgaagctcaggatcctaatcgtggcggcggccgtcgccgagtacctggtcggcacggcctcaggggaagagggaccggtgcccgctccgacgtccgccggcgtgtacatggccgcacgggccggtgccgatgggttcttaaccgcgcttgaaccagttgcccatcatgaacggcgagaacattcacgccaacccagcgtagcccaacacgaacagcaggcctgaccagaactgagccaactagaggcggggtaccctgtctcgtactggcaacagcaggtacttgcatccaacccacttgc

SEQ ID NO: 28983 - DNA, 391 bp, Zea mays
  Clone ID: LIB3180-040-P2-M2-C2
gtgatgtagagaacatccttgttgaaatgggaacatactttcaagtccaggatgactatctggattgttatggtgatcctgaatttatcggcaagattggaacggacattgaagattacaagtgctcatggctagttgtgcaagcccttgagcgtgctgatgagagccaaaagcgcattctatttgaaaattatggcaagaaagatccagcctgtgtggcaaaagtgaagaacctctacaaagaacttgacctagaggcggtatttcaggagtacgagaatgagagctacaagaagctgattgcagacattgaagcccagccaagcattgcggttcagaaagtgctgaaatccttcttgcacaagatctacaagaggcagaagtagggtgc

SEQ ID NO: 28984 - DNA, 223 bp, Zea mays
  unsure at all n locations
  Clone ID: LIB3180-040-P2-M2-C3
gttgcaagaggtggaggaagacggatcggagccggagtcgtcgccctcgcctgcacctccgcggtcgnggtcgtggtcacgacgatcggggcgcgcggggccggcctctgtggcgagtgcaccgccggcgtgtacgattcacgcccattaccgcgcgttcatgggtcgctacttcaggttctatctgtagatcatggtgcgcatgtttgcagtttgtcttggt

SEQ ID NO: 28985 - DNA, 430 bp, Zea mays
  unsure at all n locations
  Clone ID: LIB3180-040-P2-M2-C4
tcgaccgtcactcaacacagcacangcagttcgagagagagagagagagagagagagataaagatgtcgtggttcgggcaccaccaccacaaccagccggttcccccggcgtcgggccccaaccaggtgttcaagatcttctgccgcgccaacgagaactactgcctggccgtccgcgacggcgccgtcgtgctggccccggtcaaccccaaggacgaccaccagcactggtacaaggacatgcgcttcagcacccgggtcaaggacgaggaaggcatgccggcgttcgcgctcgtcaacaaggccacggggctcgccatcaagcactccctcggccagtcccacccggtcaagctcgcgcctttcagcccggaccaggaggacgcgttggtgctgtggacggagagcaaggacgtgggcaagggctttc

SEQ ID NO: 28986 - DNA, 450 bp, Zea mays
  Clone ID: LIB3180-040-P2-M2-C5
gagaccaactagcaacatagaaagcacaatagtgtaccaacaatggcagctaaaatattttgcctccttatgctccttggtctttctgcaagtgctgctacggcgaccattttcccacaatgctcacaagctcctatagcttcccttcttcccccgtacctctcaccaacggtgtcttcggtatgtgaaaacccaattcttcaaccctacaggatccaacaggcaatcgcagctggcatcttacctttatcacccttgttcctccaacaatcatcagccctattacagcagttacctttggtgcatttattggcacaaaacatcagggcacaacaactacaacaacttgtgctagcaaaccttgctgcctactctcagcaacagcagtttttttccattcaaccactagctgcattgaactctgcttcttatttgcaacaacaacaacta

SEQ ID NO: 28987 - DNA, 444 bp, Zea mays
  Clone ID: LIB3180-040-P2-M2-C6
tcgtacctccagcctcccactgatctggcctgtctcgagttaatcctagatcaatatgagaaggggctacagttacagtccttcaccaccaaggggctacaggagaagggcccgcagtccaagtcctcatgatcattatggtggtcgtggtagggatctcccaaccagtcttctggtcaggaatctccgtcgggactgcaggccagaagacctccgtcgcccatttggacagtttggtcgagttaaagatatatatcttccaagagattattacactggggatccccgagggtttgggtttgtccagaattatgatcctgctgatgctggtgatgcgaagtactatatggatgggcaggtagttcttggtaggcaaataacagttgtttttgcagaactgaaccgaacgaagcctttagagatgagagcttgggtcagagtcag

SEQ ID NO: 28988 - DNA, 232 bp, Zea mays
  Clone ID: LIB3180-040-P2-M2-C7
tcgcggacgcgtgggcgacacccgaccccggcgttgtgatgaggccggcgctgctcaagtccacggccgagctcctacgccgtaaccgcggctacgcttcctcggccaacccggagcggaaggtggccatcctgggcactgcggtcggcatcgggcaccctctctccctcctcatgaagcgtaacccgctcggttcctccctctccctctatgatatcgccgggacccccgg

SEQ ID NO: 28989 - DNA, 403 bp, Zea mays
  Clone ID: LIB3180-040-P2-M2-C8
cgccccgccggccgaaaccaagtttctccgcggccgcccggatccccgacccccggccccgagcgttccatgggctcgccttccgcatcgaggcattagcaagcctcgcgccgcactgccgtgcccccgacgcctgcctttgcctcactggttttggaaggaatccaagatgggtgttatcagcacagtgctgggtttctctggttttggctttgggttctcggctggcattgttattggttacttcctcttcatctacgtccagccaaccgatgtcaaggatgtcaaggttcgcccgcttgtagaatatgattcaaaatccttggagggcatccttcctgaaattcctttatgggtcaagaatcctgactatgatagaattgactggctgaataggttcttg

SEQ ID NO: 28990 - DNA, 434 bp, Zea mays
  Clone ID: LIB3180-040-P2-M2-C9
tatacggtcacctttctatcttcctttgcctttcccctacctctccctgactttactactggcgacgactggacaagtgccaccaaacttcgacaggtcttcaccggcgacaagcacctacaaggagacactattccttttcttcacttggagaataatctatctttgctccgatcaagcttttcaaacataataagcaaatagtctctgcacgggattgccaaaattagtcaagacgggtgctctttgctgcgtggccgctaggccacatgggacaaagtctgaccctgctagcagagatcgttctatggatcctactgagcctcgttggcgcataaattcgagcttttctcctccaacgtcaaggaggtgggattgccgctattcatcagatggattgccccacagagttcatgatgctcctcatgatcacc

SEQ ID NO: 28991 - DNA, 201 bp, Zea mays
  unsure at all n locations
  Clone ID: LIB3180-040-P2-M2-D1
cccacgcgtccgcccacgcgtccgctcgctcgctccgcattgcccgcatcgcctccaatctcagcagaccaggtcgagtttcgcgcggattttcagtgtgggaggggagtggaggtntcacggttgcatcatatgaagcgcgccatggacccgtgcccgtacgtgcgggtgctggtcggcaacctcgcgcttagaatgccg

SEQ ID NO: 28992 - DNA, 458 bp, Zea mays
  Clone ID: LIB3180-040-P2-M2-D11
ctttttgtccttgttcttctccgtcgccggtgcgctcgcctcctgcctccctccccctttgcgagcgatcgtgaggggatcgagatggcctcagcctcacaccaatccgagcccctcgactccgctgccaccagcgacaccgacgccccctcagataacatcccagatttaccatgccccccctatcatatcgttaccaaacctggtcaactcccagtcgagtttcttgaaccctcagctgcccagaagttggtaattggatttgactgtgaaggtgttgatctctgtcgcaatggtgctctctgtattatgcagcttgcattccctgacgctgtttacctagttgatgctattgagggtggaaaagaacttattcaagcttgtaagcccgcacttgagtctgatcatgtcaccaaagttattcatgattgtaaaagggacagcgaggcttttttttt

SEQ ID NO: 28993 - DNA, 462 bp, Zea mays
  Clone ID: LIB3180-040-P2-M2-D12
caacaagcaacatagaaagtggaatccagtagcaacaatagagcaacaatggcgaccaagatattttccctccttatgctccttgctctttctgcatgtgttgctaacgcgacaattttccctcaatgctcacaagctcctatagcttcccttcttcccccataccttccatcaatgatagcttcagtatgtgaaaacccagctcttcaaccctataggctccaacaagcaatcgcagcaagcaacatacctttatcacccttgtttcaacaatcgccagccctatctttggtgcagtcattggtacaaaccatcagggcacagcagctgcagcaactcgtgctacctgtgatcaaccaagtagctctggcaaacctttctccctactctcagcaacaacaatttcttccattcaaccaactgtctacattgaaccgtgctgcttatttgcagcaacaacta

SEQ ID NO: 28994 - DNA, 57 bp, Zea mays
  Clone ID: LIB3180-040-P2-M2-D2
gtgatatacagaacactaaacagagttagacggtgttcatttattctaaggctataa

SEQ ID NO: 28995 - DNA, 115 bp, Zea mays
  Clone ID: LIB3180-040-P2-M2-D3
ggctacgcacagcggaactggaggcagcgcacctttgtccggcgtgtgcagacagtgagaggagagagagagagagagagtgtgtgtgttccaggatgcaaggtggcgtggtcga

SEQ ID NO: 28996 - DNA, 422 bp, Zea mays
  Clone ID: LIB3180-040-P2-M2-D4
gtagatgcttggattacagcaaactgatacccctgttgttggaatcatcactcgtctaacagttcagaagggaatccaccttatcaaacatgcaatgcatcgagctcttgaacgcaatggacaggtggttttactgggttctgcaccagatcctcgcatacaaagtgactttacaaatttggccagtaagctgcatggtgaataccatggccgagtgaagctatgtctaacctatgacgagccactgtcacatttgatatatgctggcgcagacttcattctcgttccttccatcttcgaaccttgtggtctaacacagcttattgctatgcgctatggatccatcccagttgttcggaaaactggaggcctgtacgacaccgtttttgatgtcgacaatgataaggatcgggctcaagcac

SEQ ID NO: 28997 - DNA, 417 bp, Zea mays
  Clone ID: LIB3180-040-P2-M2-D5
tgcacgcacccgaccccctcctgccggcctcgatctcgtctgctcctccgtacccaatccctcgcggagggcgagggtggaagcgagtgacgatggcggtgctggaggcggcgagggagtgggcggactccgtcataccgccggagctcgccgccgcctggtggggagacccactcgccgtgctggcggacaccgtcgagggcctcgtcgcggggctgcttattatcgatctctggccccgatccggaggcggtacgccgatcatgccgctggccacacttgtacggccatcatctttcaaggtggacgcctaccccggcgttttgattgccgtatcgcgccatcatattttttgggaaaaatactggcatgttcgacgggtttgttaagttcatgactgatgaggctcgggctcat

SEQ ID NO: 28998 - DNA, 465 bp, Zea mays
  Clone ID: LIB3180-040-P2-M2-D6
gcttggtgatgcccagcatgttgaggaggccgagaagatgggacttgactacatggatgttgaggctctcaagaaaatgaacaagaacaagaagcttgttaagaggcttgccaagaagtaccatgctttcttggcatcagaggccatcatcaagcagattccccgtctccttggtcctggtctcaacaaggcaggcaagttcccgaccctggttactcaccaggaatccctcgaatccaaggtgaacgagactaaggcaaccgtcaagttccagctcaagaaggtcctttgcatgggcgtcgccgtcggcaacttggcgatggaggagaagcagatccagcagaacatccagatgagcgtgaacttccttgtttcccttctgaagaagaactggcagaatgtgagatgcctctacgtcaagagcaccatggggaagccatacagggtgttctaagtatgctcttt

SEQ ID NO: 28999 - DNA, 341 bp, Zea mays
  Clone ID: LIB3180-040-P2-M2-D8
ctccatttagatcccatgtggaatcaacccattcttgttttctccgggtagcagcctcttaccctcatggccaagatcaagatcgggatcaatgggttcggcaggatcggaaggctggtggccacggtggccctgcagagcgacgacgtcgagctcgtagccgtgaacgacccctttataaggaccgattacatagacctacatgttcaagtatgacactgtgcacggacagtggaagcaccatgaggtcaaggggtaggactccacaacccttctgtttgttgagaaggaggttgctgtgtttggctgtaggaaccctctggagatcccctggggttccc

SEQ ID NO: 29000 - DNA, 413 bp, Zea mays
  Clone ID: LIB3180-040-P2-M2-D9
cgacgcgccgtcactgaatcctcagatcacggctagccgtaatcacgccactctgctgactcccggcgagcagtgtaacattttccttcagccatgggcaaggagaagactcacatcaacattgtggtcattggacatgtcgactctggcaagtcgaccaccactggccacctgatctacaagctcggcggtattgacaagcgtgtgattgagaggttcgagaaagaggccgcggagatgaacaagcggtcattcaagtatgcctgggtgcttgacaagctcaaggccgagcgtgagagaggtatcacaattgatattgctttgtggaagttcgagaccaccaagtactactgcactgtcattgatgcccctggacaccgtgacttaatcaagaatatgattactggcacttt

SEQ ID NO: 29001 - DNA, 450 bp, Zea mays
  Clone ID: LIB3180-040-P2-M2-E1
ttagcaacatagaaagcacaatagtgtaccaacaatggcagccaaaatattttgcttccttatgctccttggtctttctgcaagtgctgctaccgcaaccattttcccacaatgctcacaagctcctatagcttcctttcttcccccatacctctcaccagcggtgtcttcagtatgtgaaaacccaattcttcaaccctacaggatccaacaggcaatcgcagcaggcatcttacctttatcacccttgttcctccaacaaccgtcagccctattacagcagttacctttggtgcatttgttggcacaaaacatcaaggcacaacaactacaacaacttgtgctaggaaaccttgctgcctactctcagcaacagcagtttcttccattcaaccaactggctgcattgaactctgctgcttatttgcaacaacaactaccattcagtca

SEQ ID NO: 29002 - DNA, 422 bp, Zea mays
  Clone ID: LIB3180-040-P2-M2-E10
tcgcttaaggaaagggaaggaagcatgttcgggcaccaccacggccacggggggcaccaccaggccccgtcgtcgtacgagcagacgctgttcaggatcttttgccgggccaacgaggcgtactgcctcaccgtgcgtcacgacgccgtcgttcttgcgcccaccaaccctcgcgacaagtaccagcactgtttcaaggacatgaggcacagcacgaaggtgaaggacgcggagggccagccagcgttcgcgctcatcaacagggccaccggcctcgccatcaagcacttgctcggccagtcccatcccgtgaagctggtgccctacaacgcggagtacctggacgagtcggtgctgtggacggagagccacgacttgggcaagggctttcgctgcatcctgattggtaacaacattcacct

SEQ ID NO: 29003 - DNA, 408 bp, Zea mays
  Clone ID: LIB3180-040-P2-M2-E12
acgaaattgggacgtaaaatactaaggggcagctcgctaaacctgtatagctttcctagtataaattgtagaattatttgatggcaactggggtcctcctggctgcaacaattgcagaaaaaggatactccagcgtctgagaatggtaaggggaatgcaatgaagactgacaaagaaccagctgtcagaggtcttggaaagcattttgaacaattaaggaaacttaaaaagaaagaatgcaacaatgaaggttccagttctgagaaggaagaatgtagcaataactattcatcaatgaatggtacacaagtatcagatatgatagctgctgatgaagcaaataacggggctgatattagcaagttaatgtcagaggatgctttccttagcttaaagagtttgggagct

SEQ ID NO: 29004 - DNA, 204 bp, Zea mays
  Clone ID: LIB3180-040-P2-M2-E2
tttagctttatctactccagagcgcagaagaacccgatcgacaccatgaggggtgttgctcgttgccctcgctctcctggctctcgctgcgagcgccaccttcacgcatacaagcggcggatgcggctgacagccaccgccgtcggtttatctaccgccgccggtgcatttgccacctgcggttcacctgccacctccggtgca

SEQ ID NO: 29005 - DNA, 445 bp, Zea mays
  Clone ID: LIB3180-040-P2-M2-E3
tgatcactggtacctcccaggctgactgtgctgtccttatcattgactccaccactggtggttttgaggctggtatctccaaggatggccagacccgtgaacatgctctccttgcgttcacccttggagtgaagcagatgatttgctgctgcaacaagatggatgcaaccactcccaaatactccaaggcacgttatgaagagattgtgaaggaagtctcatcctacctcaagaaagttgggtacaaccctgataagattgcctttgttcccatttctggttttgagggcgacaacatgattgagaggtccaccaaccttgactggtacaaaggcccaaccctgcttgaggctcttgaccagatcactgagcccaagaggccttcggacaagcccctgcgtctgcccctccaggatgtgtacaagattggtggtattggaactgt

SEQ ID NO: 29006 - DNA, 410 bp, Zea mays
  Clone ID: LIB3180-040-P2-M2-E5
tcgttcgttctgtacgtcctccccccatccacaggcattctgtgtgctcctactggtcctcgatttgatcaccgattaggggaggcggtttaccagcgagcacgcgcgagagataggataggaggaaagggaagctagcggcttcgttctcgcggcgcgatggctcaggcggtggaggagtgtaaccgcatgatgcccattataacgcgctcctacttgaccgcccatgttcaaacaacccaagcttgaaccctcaaaatcatttggtcggatcacctgtacgttaacccgaatctaggggagcattattacgcgatttggagcctttgaaccaactttttatactttcgtaagatggattgggattttatattccacatgttctttgtagctcgattctgcaagctttt

SEQ ID NO: 29007 - DNA, 381 bp, Zea mays
  Clone ID: LIB3180-040-P2-M2-E6
tttttggcttcttactacacaaccggttcagggacaccccattccacagcaccgctccccttcggcctccctttccgcaccgcggaggacaagtcaaataccgcgcgtgtgtaccacttggagccatccggcaccacgccacgagtccacagtccgcgcgccccccacgggccgtcgtcgccccggcttctcctctccttcccccaacccctcgcgaaagctcgccgctgctgcgtccgcgccccgtggcggcacggcgcggcacctcgtggggaatccgacggaggccttcgccgagcctttgggggccggcgctttttcctggtgccgtccttttgtactgcctgcgggtgggttgttccgatcataaccgacaaggcg

SEQ ID NO: 29008 - DNA, 294 bp, Zea mays
  Clone ID: LIB3180-040-P2-M2-E8
gatttggaggggaggggagcgccggttcggattgtgcaggctcgctgctggttcttgcagcggcccgacacagaggggtgtgcgtcccaaccattctcttaaacaaggcccttccttgacagctcgtctctatgtgggtattcttgacgaatgatgtactgattacctgccttcgctcgctttgtgaacaactcaaccgcgatgtcaatctgacggggactaaagatgatctcgcgcttcttgtgttaaattttaaaaaggaatttgatgacacgagggctaaactttttactg

SEQ ID NO: 29009 - DNA, 457 bp, Zea mays
  Clone ID: LIB3180-040-P2-M2-E9
tcgcggacgcgtggggtccaacagcggcacagcccacgggccacgcccagttgatatccctgatggcctgatgtcgcaactcgcaaccctagctcccagcctcccactcccacgcgcttcaagtcttcccaggcggccggcggcgtactcccagagtcccagacggccaatcttcccagcatcgggtggcgtcctcactccaggcggcaggcggctgcaccgccgcagtcacgaactcacgcgcaccgcgggcccgcggaagcgcgcacacgcgcacacgcgcacggtgcaccagcagccgtgagccggccagtccggcagtcccagcctcccaggcggccagtcctcccagtcccagtcccagctgcctaggtctgccgcctgtcttgaccccacccactggccacttcccctcctgtccgttcccaaatcccgtcccctccacccgcactccatt

SEQ ID NO: 29010 - DNA, 448 bp, Zea mays
  Clone ID: LIB3180-040-P2-M2-F1
ccggcctcttcttaactcggggtgctcgagttggatgttcggggacgcacggggccatgcgcgcggcggccgcggccaggaaggcggtcatggttcctgagggcgagaatgatggcctcgcatcaagggctgactcggctcaattccagtcggatgaactggaggtaccagacatttctgaagagacaacgtgcggtgctggtgtggctgatgctcaagccttgaacagagttcgagtggtccccccaccaagcgatggacaaaaaatattccagattgaccccatgttgcaaggctataagtaccatcttgagtatcggtacagcctctatagaagaatccgttcagacattgatgaacatgaaggaggcttggaagccttcttccgtagttatgagaaagttggatttaatcgcaacgcggaaggtatcacatatcgagaatgggc

SEQ ID NO: 29011 - DNA, 405 bp, Zea mays
  Clone ID: LIB3180-040-P2-M2-F10
tgtagactgtagttctgttcctccccggtcactcctgcgcttcctcgccgcgcggttccttctccctgatcctcctttggcttcgcggttcatggcgatgtggagggccgccgctaggcagctggtcgaccgggcgctcggctcaagggccgcgcacacgtctacaggcagcaaaaagatagtcggggtgttctacaaggccggggagtatgccgacaagaaccccaacttcgtcggctgcgtcgagggtgcactcggcatccgcggctggctcgagtcgcagggccatcaatacattgtcaccgatgacaaggaaggccccaactgtgaactggagaagcacattgaagacatgcatgtcctgattaccaccccattccacccagcttatgtcactgcaaagag

SEQ ID NO: 29012 - DNA, 414 bp, Zea mays
  Clone ID: LIB3180-040-P2-M2-F11
cccacgcgtccgcccacgcgtccggacaagctctgcgaccaggtctcagatgctgttctggacgcttgccttgctgaggaccctgacagcaaggttgcttgcgagacctgcaccaagaccaacatggtcatggtctttggtgagatcaccaccaaggccaatgtcgactacgagaagattgtcagggagacatgccgcaacattggtttcgtgtcgaacgatgtcgggcttgacgctgaccactgcaaggtgcttgtgaacattgagcagcagtcccctgatattgctcagggtgtgcacggccactttaccaagcgccccgaggagattggagctggtgaccaggggcacatgtttgggtatgcgactgacgagacccctgagctgatgcccctcagccatgtccttgccacc

SEQ ID NO: 29013 - DNA, 380 bp, Zea mays
  Clone ID: LIB3180-040-P2-M2-F12
ggcgaggcaaaagcattgcgaccacagacagcgcgcgcttaaaggcctttttttttttgagataacaaggaggagaggaggagatggcggtcacgatcacgtgggtgaaggcgaggcagatcttcgacagccgcggcaaccccaccgtcgaggtggacgtgggccttagcgacggcagctacgcgaggggggccgtacccagcggcgcatccactggaatatatgaggccttggagttgagggatggaggatctgattatcttggcaagggtgttcttaaggctgtcagcaatgtaaataacattattggaccagcaattgttggaaaggaccccactgagcaggttgagattgacaacttcatggtccaacagcttgat

SEQ ID NO: 29014 - DNA, 271 bp, Zea mays
  Clone ID: LIB3180-040-P2-M2-F2
cggacgcgtgggcaaggctgtctcgaagattggacagcacatgtctggtggtggctctggcggctcgcagtcaggatctggacctcagggtggcggcgaccaggcgccggaggcagagtatgaggaggttaagaagtgaggctgcgggagttcaagggaattgtagcggcttgtttagaagtagctcgttttttttttgggaacgcagatagtcagatgtctcaaatgaggtgtaacctgtgttgcaataatctatgaacttaccccaatt

SEQ ID NO: 29015 - DNA, 261 bp, Zea mays
  Clone ID: LIB3180-040-P2-M2-F5
tcctcctcgccaataggatcactacgctcgtgcgcgcccctcctcctcccatggccgccgccgccgtcgcgggagcgcggaggccattgcaccggaccttggcgcacccgccaccgcccgaggaggacgagcatcagcagcagcgcgcgtgccgcagcaggggatcctcgtcctcctgctcggcttcctcgtcatcgacgcccgcccggccccggggcacggggatggtggtgatcgttgttaccattgtcacttcgaaga

SEQ ID NO: 29016 - DNA, 436 bp, Zea mays
  Clone ID: LIB3180-040-P2-M2-F6
gtgtgacaaagccgctgcaaatgattgagcagacctcaatcctcaagctcatgatagtgttcttggaatcattctgggaggtggtgctgggactagattgtaccccttgacaaagaagcgtgccaagcctgcagtgccattgggtgccaactatagactgattgatattcctgtcagcaattgtctcaacagcaacatatccaagatctatgtgctaacgcaatttaactctgcttccctcaaccgtcacctctcaagagcctacgggagcaacattggagggtacaagaatgaagggtttgttgaagtcttagctgcacagcagagcccagataatccaaactggtttcagggtactgcagatgctgtaaggcagtccttgtggttgttgaggagcataatgtgatggaattttatttttgctggcgtcacctgt

SEQ ID NO: 29017 - DNA, 443 bp, Zea mays
  Clone ID: LIB3180-040-P2-M2-F7
ttccggtggctccaccactagcaacccgtgcagcgagcccaccccgaccactgccatgtcgaggcgcggcgactgggtctacgagaacaacggcgggacctgcgtggccatcgccggcgccgattactgtgtcgtcgcggcggacacccgcctctctgtcggatacagcatcctcacgcgcgaccactctaagatctgcgacctgtgagtccctgaacccgatctcgtgcttcgatctgtccatctgggctttagggtttgtggattgggaggcacgagtgaattttggtgtggcgtgggctaaaatatgggtgacaaggctggattcgtagcaggatttggtgctgccactggttcttttagctagggtttggtgcgtggaggattgtgtcgaaaattatgggggaaatacctttacattctatatggtttatacgtttttc

SEQ ID NO: 29018 - DNA, 450 bp, Zea mays
  unsure at all n locations
  Clone ID: LIB3180-040-P2-M2-F8
tctcgcgcacactctccaatgacccaatctccccgagcctgccactgccagcgccagctcctccctggcattccagtcccagctccggatcgcttcacgggccgggaagcagcacccgcgctgcgcgcctgatgcgcgcagccaatgccggcgctcgcgtccaccgccatggcccgagccgccgcgcccatcctcctccacctcctcctccttctgctcctcctcactgaccacggccccggccccgccgccgcggtgcgcttcgactacgcctcgctcaccctcggcagcctgaggctgctgggcgacgcgcacctcaagaacggcaccatccgcctgtcccgggacctgcccgtcccgacctcgggcgccggccgtgcgctctacgccaccgnggtgcccctccgcgggggcttctccacgcagttcgccttcaccgtggccacgctc

SEQ ID NO: 29019 - DNA, 266 bp, Zea mays
  Clone ID: LIB3180-040-P2-M2-F9
gctctcactagcctcgcattccgtccctgcagtgcaggggcaggccggtgaggtctgggagaggaggaggaggaggagatggccggtagggagagcggcggcatggcggaggagctgcgctgcgctggaaggatcgggatcctggccaccgtcgtagtgaacctcgcgtggatcgagacgtacattcgcacggtctacttttgcggcggtaaccgatcctactacatcgccagggtctgggaggtgtagccgtgttgtgttaagac

SEQ ID NO: 29020 - DNA, 442 bp, Zea mays
  Clone ID: LIB3180-040-P2-M2-G1
caaagaggttgtgaagaacaagaagtaccttgcagttgctgtgccagatgagggtgcccagacccttctggttcaggccattgaggcttttggtgggaagtgcaaccctgaggcgctgaaggaggttcccgttgtcctcaaagccctctacgatggagatatcctggacgaggaaaccattgtggactggtacaatgatgctgtcgcagctgggaaggactcccaggttgtcaagaatgccaagccgttcgtcgagtggctccagagtgccgagtctgatgaagatggtgacgactagtgaagaaaccacgctgctctactgctaatggccaaacttgataatattatttcaataagtttgttttgcttgcctggtgtcggtgtttaaaacttgtaattgtcgtgtggcgcagaatacttttatgtgtcgtcgtcagtttgt

SEQ ID NO: 29021 - DNA, 383 bp, Zea mays
  Clone ID: LIB3180-040-P2-M2-G11
ggctggtggccagggtggccctgcagagtgacgatgtcgagctcgtcgccgtgaacgaccccttcatcagcaccgactacatgacctacatgttcaagtacgacactgtgcacggacagtggaagcaccatgaagtcaaggtgaaggactccaaaacccttctctttggtgagaaggaggttgctgtgtttggctgcaggaaccctgaggagatcccgtggggttcggttggtgctgaatatgttgttgagtctactggtgttttcactgaccaggagaaggctgcagctcacttgaagggtggtgccaagaaggttgtcatctttgctcctagcaaggatgcccccatgtttgtcgttggtgtcaacgagaaggagtacaag

SEQ ID NO: 29022 - DNA, 395 bp, Zea mays
  Clone ID: LIB3180-040-P2-M2-G12
gagcagtagcggtggcgatggagggcaaggaagaaggtcggatcttcgtgggcggcctgtcgtggcaaacggacgagcgcaagcttgaggacgcctttggccgcttcggcaaggtcgtcgacgcccagtaccattgctgcttgagccttgaggacagtaaatgattctgccatccggaccaatgctgggtgctggagcagaaaattgatgctagcctcaccagtgtggaccctttcagccagctccatgcgatgcattgcagttttgggaagacaaactgggtaactaggagcccagcttaccagcagctcagacttccactgttgttaccatggaaatgcaagtcgtttggctttaggtttgtgcattggtttaaatgatctggtatgcaaact

SEQ ID NO: 29023 - DNA, 451 bp, Zea mays
  Clone ID: LIB3180-040-P2-M2-G2
gcccctgctcgtcatcgtgctcttcttccccaagtccagcgcccccatccgcatcaacacggggctcacgctcttcacgctcacgctcgtgctcgtgcccgcaatggacgtcatctacgtcaaggggagggccgggctgtacggagcgttcgatgtgactgtcgccgccacggctctgtgcggggtcgccgacgcgctcgtgcagggaggcgtcatcggcttcgcgggggagctgcccgaacggtacatgcaggccgtcgtcgccggaaccgccgcctcaggagtgcttgtctcggcactgagagtcttcaccaaggcactgtacccacaggacgcgaacgggctaaggcaaagcgcgatcctctacttcgtggccggcatagtcctcatggtcatctgcatcgtgtgctacaacgtggcggacaggctcccggtcgtgatatactacaag

SEQ ID NO: 29024 - DNA, 455 bp, Zea mays
  Clone ID: LIB3180-040-P2-M2-G3
ggacaaagaacggttggtcaaacttagaacacttggaaatattcggctaattggtgagctactcaagcaaagaatggttcctgagaagatagttcatcacattgttatggagctattggggtctgggccagataaaaaaacatgccctgaagaggaagatgttgaggccatctgtcatttcttcaatacgattggtaaacagcttgatgaaaacccaaagtctcggcggatcaatgatacctactttatccagatgaaggagctaacaatgaatccccagcttgcaccacgtttgaggtttatggttcgtgatgtgattgatctccggtcaaataactgggtgcctcgacgagaggagattaaggccaagaaaatcagtgaaattcactccgaggcagaaaagaatcttggattacgacctggagcagcatctggcattaggaatggccgtagct

SEQ ID NO: 29025 - DNA, 438 bp, Zea mays
  Clone ID: LIB3180-040-P2-M2-G4
gtccaaatcagtttgtctgctccgcccgttgcccgtggcccgtcggtctctctcgcagtctcgccgctccccttcctcccccgcaggaatccgaatcatccggcgacctaggtctctcggcttgtccgcagcccgccggtcagtaatggcgcaggatgatccggttgtttctgctcagtggctgcacgagcacctaggaatgcctgatgttaaggttttggatgcttcctggtacatgccggtagagaacagggatccatggaaagaatatcaggtggcacacatccccggtgcgctattcttcgacttagatggcatagttgatcggacaactgatttaccacacatgctgccatcagaagaggcttttgcagcaacaatttctgagctggatataaaaaaccaggataaagttattgtctatgatggaaagggatt

SEQ ID NO: 29026 - DNA, 421 bp, Zea mays
  Clone ID: LIB3180-040-P2-M2-G7
cttcgtaaacccttctctcttcttcccgcggcctgctcgttcgatctgtccagcagacttgaggttccgagcggccggaaaccagcggcaaacgtcggcatggcgctcgtattgcattctggggctggaaacaaaaatgccttcaaggcacttattgctgcagaatacagtggggtcaaggttgagttgaccaaggattttgagatgggtgtctccaacaagacccctgagtttctaaagatgaacccccttgggaaggttcctgttctggagactcctgatggccctgtttttgagagtaatgctattgcgcgctatgttgctcgcttgaaggatgacaaccctcttttcgggtcttcccgtattgaacaagcccacgttgagcagtggatggactttgctgcaacagaagttgatccta

SEQ ID NO: 29027 - DNA, 427 bp, Zea mays
  Clone ID: LIB3180-040-P2-M2-G8
tcgggcttctcctccccctccggttcgggttcgggttcgtgaggttctccggggttcggtttcgtgggtgagcggatcgagatggcggcgtcggatgttgagtaccgctgcttcgtcggcggcctcgcctgggccacggacgaccactccctccacaacgccttcagcacctacggcgaggtcctcgagtccaagatcatcctcgatcgggagacgcagaggtcccgcggcttcggcttcgtcaccttctccacggaggaggcgatgcggaacgccatcgagggcatgaacggcaaggagctggacggccgcaacatcaccgtcaacgaggcccagtcccgcggcggccgtggaggcggcggcggcggcggatacggtggtggccgtggaggcggcggctacggcggtggcggacgccgtgatggcg

SEQ ID NO: 29028 - DNA, 424 bp, Zea mays
  Clone ID: LIB3180-040-P2-M2-G9
cgccgcaccaagtgagctagctactctctaggcggagtgaagcgaagctagcttagctgcctcgagcttgagctgagcttgctcactcttctcccctcttcttctagtaccggcacacacaccgcagctgcgaaaaaggaagctctctctctctggtggtgccggtgcgccgtgcttgcttgcttgcttgcggctgcatccatggacgcctacgaagccaccaaggtggtgttctcgcggatccaggcgctggacccggaccacgccgccaagatcatgggcttcctgctcatccaggaccacggcgagaaggagatgatacgcctcgccttcggccccgaggcgctgctgcacaccgtcatggccaaggcgcgcaaggacctgggcctgctcccgtcgccaggcccggggacgcccacattcg

SEQ ID NO: 29029 - DNA, 456 bp, Zea mays
  Clone ID: LIB3180-040-P2-M2-H1
gaagaaagtgaaaggctgcgacagcaggaacgtgagcaaattgcagagaagcgtaagcgtgatatgacgctccgcgctcgtgtagctgctaaggcagaagaaaagaggttggagctattgtacattcagtggactgagcatcataaaaggctgtccaatttcttaaggttatttttatttctggtccaaaagtgtccatattgacaattaaattgagggaagatacattctaattgtatgcagacctgatgtttgataactattagtgtatctgtttacgttgtatactaatgaacaatatttgttccatgtttgactcttatctcattacccccttacgtttggcaggacaaaagctgagccacctatttattacatgccaactaaaccaattattgatgatccagccattgttgagcagaacaaggaaaaggtattcgaagaatggaaatctat

SEQ ID NO: 29030 - DNA, 433 bp, Zea mays
  Clone ID: LIB3180-040-P2-M2-H10
cgacgaagccaaagcaacacaccagcgcgcacgcacgcgcagtgttcggcgggcatcaccacctcctgtcctcctccctcctgccccgatccgccctccccgccgctcgccgaacccgatgtcggccgccgacccttccgcggttccggccgcggccgccgacccggacggccctgactccgtgcggctcacctggaatacctggccacggtcaaaggtcgaggccagccgctgcgtcgtgccgatcgccgccaccatcttgcccactcgcgtcccggatccctccgcggcatccccgccgtcgctcccttaccctccgttccgttgcaagcctccctgttccgcgctcctcaaccccttcgcgcgcgtagacttcgctgccaagatctggatctgcccgctctgcttcttccggaaccacttttccccgcac

SEQ ID NO: 29031 - DNA, 263 bp, Zea mays
  Clone ID: LIB3180-040-P2-M2-H11
gggagctaagctgaaggacattctaggggtccctgatacttatctggaagcaagatacatcactcttcatgtgtgcgaccttgtcccaaagagaggggcacgcctggctgatgctggtatatatggtattctgaagaagctgggcaaagacaaattgctggttgactttagccaacaaaggactgtatttgctattgacggtggcttatacaagcactacaagaaggtcagtgcctgcctaaaggcgacgctcacagacctgc

SEQ ID NO: 29032 - DNA, 396 bp, Zea mays
  Clone ID: LIB3180-040-P2-M2-H2
ttacgtcgagaactccgagcacaaattggggctgaaggacaagaagaagccggtcatcttttcaatggcgcgtatcgaccgtttgaagaacatgacaggcctggtggagatgtacggtaagaacgcgcgcctgagggagctggcaaacctcgtgatcgtcgccggtgaccacggcaaggagtccaaggacagggaggagcaggcggagttcaagaagatgtacagcctcatcgacgagtacaagttgaagggccatatccggtggatctctgcgcagatgaaccgtgttcgcaacggagagctgtaccgttacatatgtgataccaaaggcgcattcgtgcaggctgcgttctacgaagcgttcggcctgactgtgatcgagtccatgacgtgcgg

SEQ ID NO: 29033 - DNA, 453 bp, Zea mays
  Clone ID: LIB3180-040-P2-M2-H4
attttgagcattcagaaacacaccaagcgaagcgcactagcaacgacctaacaacaatggctaccaagatattagccctccttgcgcttcttgccctttttgtgagcgcaacaaatgcgttcattattccacaatgctcacttgctcctagtgccattattccacagttcctcccaccagttacttcaatgggcttcgaacacctagctgtgcaagccaacatgcaacaacaagcgcttgcggcgagcgtcttacaacaaccaattgcccaattgcaacaacaatccttgccacatctaacaatacaagccatcacaacgcaacagcaacaacagttcctaccagcactgagccacctagccatggtgaaccctgccgcctacttgcaagagcagctgcttgcatccaacccacttgctctggcgaacgtagttgcaaaccagcaacaacaac

SEQ ID NO: 29034 - DNA, 406 bp, Zea mays
  Clone ID: LIB3180-040-P2-M2-H5
tccacacaaacgccaccgccgcatcgaatccgagacgccgatctcggattcgccgtcaccacacgctgccctcgtcgcgctctcccgccgccgccgttcgtttcgtcagccatggcaggattggcaccagaagggtcgcaatttgatgacaagcagtatgacaagaaaatgcaggagatattaactgaagacttcttcacttcatatgatgatgtttgtgaaagttttgacagcatgggactgcaagagaaccttctgagaggcatctatgcctatggttttgagaagccatcggctattcagcaaaggggaatagttcccttctgcaaggggcttgacgtgattcagcaagctcagtctggaactggaaaaacagctaccttctgttctggaatcttgcagcaac

SEQ ID NO: 29035 - DNA, 459 bp, Zea mays
  Clone ID: LIB3180-040-P2-M2-H6
gcaaagaaatgggttcctttctgcaaaagatatagccttgagcctcgtgctccagagtggtacttccaacagaagatagactacctgaaagacaaggtggcgccaaactttgttagagaacggagagcaatgaagagagagtatgaggaattcaaggtcagaatcaatgccttggttgctaaagcccaaaaggttcctgaggaaggatggacaatgcaggatggaactccatggcccggaaataatgtccgtgatcatcctggaatgattcaggttttccttggtcaaagtggtggccatgatgtggaaggaaatgagctgcctcgattggtttatgtttcaagagaaaaacggccaggctacaaccatcacaagaaggctggtgctatgaatgcattggtccgagtctctgctgtactaactaatgcttcttatttgctgaacttggattgggatcac

SEQ ID NO: 29036 - DNA, 433 bp, Zea mays
  Clone ID: LIB3180-040-P2-M2-H8
tcgaagagatcaatgcattggtggtagatgagagaccggtccgtgccaagggtgctaagtatcatttgcagagactgggagttcagactgaattgacaactgacctagatcagtatatttctaaaaataattgtggatcacagattgcaaagcttgtgctcattgacaaagaaacctggctgaaagaatcccactccatgcctcttttggttactaaattgaggaacaaagatcagccagactctacaaagttatttcttttggagaaccctaaaagttctgtcaagagcaattcacatatattcagggaatataacttgaatgtaattatgaagccacttcgtgcaagcatgcttcaggtttcgctacaaagagcattgggtgggatagataaactgcattgcaggaatggagtagttgggaattcaacact

SEQ ID NO: 29037 - DNA, 386 bp, Zea mays
  Clone ID: LIB3180-040-P2-M2-H9
ggctgggagaaaaattctcgtgtgctgtcaaaatggagaagatataagtatttgtgtggccttggcaatattggccttgttattcgatgataacggatgctttgactatggaaattattttgtcaaaagagatgttacaaagttggagatgaggaggaggctggtattcatctgtaaatttgctgtaaacgcacggccatctagaggaaacttgaaacaggtgtatggtttcctcagcagtcaaaaggaactgctgtcatgtttgacatagcttggtcttctgtgatgtaaatgaggtatcagttctgatctgctgcttgagtgataggtgtggagtacgagctggggcttctgagtttgtctttcacacagtctgttgatcagat

SEQ ID NO: 29038 - DNA, 327 bp, Zea mays
  Clone ID: LIB3180-041-P2-M2-A1
tcgtgtggcggctatcctcacctcatctccggtcccccctccctagggtttaggctccaccaccacctacccaccgcctttccccaccacagataagaattatcttatcgattttttacaccggccttgaatccgatccaggagcagtcgtttggtgttggtagctgcggcagacgtctgtcctagatcgaattgactcgcgagaagaagccatgtcgacagttgctcctgcccctagcgctgttgaccagaccaccaatcttttgcaaaagctgtcttttgagggcaaggatggctccgacactgccaaaaaaccttttgggatgc

SEQ ID NO: 29039 - DNA, 231 bp, Zea mays
  Clone ID: LIB3180-041-P2-M2-A10
tcgcgttgaccaaacaagagcggcgcgggtcacggcggcctagctcgccggcctaacgaggccagatattccttaacctagctagctaacagctgactagatagatcgatccatcagctggcagccatgaatatgatcagggcagtacggcgccggttcaccggcggccacctggctacggccaaggaccccgccacgctgagccacgcggccgccgagcttctagccacc

SEQ ID NO: 29040 - DNA, 392 bp, Zea mays
  Clone ID: LIB3180-041-P2-M2-A11
gggacgatgaccgccgatttggcttcttctgtcgttctgctctagagtttctcctccaaagtggatcttctcctaacataatacattgccatgattggtcaagtgctcctgttgcctggctacacaaggaaaactacgcgaagtctagcttggcaaatgcacgggtggtattcaccatccacaatcttgaatttggagcgcatcatattggcaaagcaatgagatattgtgataaagccacaactgtctctaatacatattcaaaggaagtgtcaggtcatggtgccatcgttcctcatcttgggaaattctatggcattctcaatggaattgatccggatatatgggatccgtacaatgacaactttatcccggtccactacacttgtgag

SEQ ID NO: 29041 - DNA, 421 bp, Zea mays
  Clone ID: LIB3180-041-P2-M2-A2
tcggactagttttagatcgcgagcggacggcgttttttttttttttttatgggggtggggaaataaaaaaacataaattaataataatttagttagaaaaaaaaaaataattttaaaaaaattaaaaaaaatggtaaaaaaaaaaattgtttaaaaaaaaataaataataattttaaaaaaaaaattatattaaaaaaaatattaaaaaaaaaaaaataataatgtaaaaaaataaaaaaaaataaaaaaaaaaataaattttaataataaaagtgtgatggaaaaagtaaatatatatattaaatatatattatattaaaaaaatatagataaaaatattgataaattttaaataaaaagtatattatatattaattattatttaataatataatatgataaaatattaaattatagtaa

SEQ ID NO: 29042 - DNA, 383 bp, Zea mays
  Clone ID: LIB3180-041-P2-M2-A5
cttcacataagcttaaccgatatgtttgggtattctcatgttctatgtttgattagtaaccagtattacatatattaattgttctgtagtttcggggctatatcatgtttctacttgttctgtttatcaaataaataaataggtgggtggtggctatagtttatgtgctcaccatgattcatacttcaattttgtaatgtttcatcaatatagttgaagcaacatggaggtgaaagactgccatgtaaccgatgaagatatgaaactgatgaaggggaagaagcataaggacatgggtcagggcctcaattttgttagcttatgtgccaggaaccatatcattgatatggagcaagcttgtgtgtcagccaagatggcttaag

SEQ ID NO: 29043 - DNA, 353 bp, Zea mays
  Clone ID: LIB3180-041-P2-M2-A7
ggttaagctgaagcagtaccaaggtgctgtggatgctgctcggaaggctaacaatgctaaaacatggaaggaggtctgctttgcttgtgttgacgcggaggagttccgtcttgcacaaatatgtggtctcaatattattgttcaggttgacgacctggaagaagtcagtgagttctaccagaacagaggatgcttcagtgaacttattgctttcatggagagtggtcttggacttgaacgtgcacacatgggcatttttacataattggggggtgtatatgcttgatacccctctgggaagcttatggagcacatttaatttttttcaccctggctaacattcttaaatttat

SEQ ID NO: 29044 - DNA, 342 bp, Zea mays
  Clone ID: LIB3180-041-P2-M2-A8
ggcggcggctgatgtggagtaccgttgcttcgtcggcgggcttgcctgggccaccagcaacgagtcgctggagaatgccttcgcctcctacggcgagatcctcgactccaaggtcatcaccgaccgggagacggggaggtctcgcggcttcggcttcgttaccttctcctccgagaactccatgctcgacgctatcgagaacatgaacggcaaggagctcgacggccgtaacattaccgttaaccaggcccagtcccgtggcggtggcggtggcggcggtggctaccgcggcggtcgcggcaggtggtggttatggtggcggacgccgagacggcggttttg

SEQ ID NO: 29045 - DNA, 234 bp, Zea mays
  Clone ID: LIB3180-041-P2-M2-A9
ctaggtctagatcaggagcgcgcggccttttttttttttctctctctttgccgcgtccgacccaccgacgaaagccagccaccttcctgagaggcctgaccgtgatttcggcgtggcatccaaaggcggtcaagattcgagaggccggaggaaccaagcgtagggccttcaaccccacgtcgttattcgagcgcgcctaccgccttcgtagggagatggaggccaattactaca

SEQ ID NO: 29046 - DNA, 69 bp, Zea mays
  Clone ID: LIB3180-041-P2-M2-B1
gaagcgaacctgcagtaccggccgaattccggtgacagcgtcggactgccccgccggcacgtggcgggg

SEQ ID NO: 29047 - DNA, 123 bp, Zea mays
  Clone ID: LIB3180-041-P2-M2-B10
tgtctttcggccgtgtgctggcggtggcggaccaggccccgctcgttcctaccagtgggccgtgcgtgcggccatcaacaccctgattgatcgacccgcgcctcggccggatggaggcgttag

SEQ ID NO: 29048 - DNA, 243 bp, Zea mays
  Clone ID: LIB3180-041-P2-M2-B11
tcgagcagccacagcagcctccttcctcctttcactctcgctcgcgctgcgctcgctacctcgcttcgcattccattcgaaaagaggggaggaaaggcaagatgttcatcgagagcttccgcgtcgagagcccccacgtgcggtacggcccgatggagatcgagtcggagtaccggtaccacaccacggaacctgttcactatggcaaggacggcccctcaccctttggcggcccccccaaat

SEQ ID NO: 29049 - DNA, 154 bp, Zea mays
  Clone ID: LIB3180-041-P2-M2-B12
cggcgggcggccatcagcaaccagcatcgtacggaggagaagcgctgtttacacccgtctggcagggatgccgctggggcagcgttcgggggacaagagcgactcccgctactgcggggtggaggtactagacttccccttagggaagggcctt

SEQ ID NO: 29050 - DNA, 378 bp, Zea mays
  Clone ID: LIB3180-041-P2-M2-B2
tcggttggcagcaccccgatcctgggccagtgcgtcgagtttctgaggcatcagtgcagcccgacggcgacgccctactgctcgcctcagtgccagtcgttgcggcagcagtgttgccagcagctcaggcaggtggagccgcagcaccggtaccaggcgatcttcggcttggtcctccagtccatcctgcagcagcagccgcaaagcggccaggtcgcggggcttgtggcggcgcatatagcgcatcatctgacggcgatgtgcggcctgcagcatccgattccatgcccctacgctgctgccggtgggttcctcttctgaagaaactatgtgcttttgtattagcctctgttctagttatgttagttgtagtcattt

SEQ ID NO: 29051 - DNA, 64 bp, Zea mays
  Clone ID: LIB3180-041-P2-M2-B4
ccgtggtcgctggaatgccctccgaccgacgatggccctgtcggccgtgacgagtgatggccgg

SEQ ID NO: 29052 - DNA, 309 bp, Zea mays
  Clone ID: LIB3180-041-P2-M2-B6
ggaagcagacaccttgattgaacaaatgactagagatcaagatcccatattacgttatggtggtatggatgcattggctctagcctacaggggaactgccaacaacaaagccatccaccagctgctgcattttgctggatcaaatggcagggatgatgttcggaggactgcagttatggctcttggatttggtcttgacaatgaggccgagcagacctcaagaattggatccctgctctctgaatcatacaacccacatgttcgctttggtgcagccttagctggtgggatatcatgtgcaggatctgg

SEQ ID NO: 29053 - DNA, 231 bp, Zea mays
  Clone ID: LIB3180-041-P2-M2-B7
ggactttctctcgcctgctcggcccttccgcccccgccggccggccggtccttttcccggcccactccgttccgatcgaccatggcggctaccgcccccaatggcaatcccactgtcagctccctcgcggcaaccgttccggtccaggcggttctgtttaacatcgacgggaccctgtgcgacttggatccccttcaccacgttgcttttcatgaaatgctttttgtgatc

SEQ ID NO: 29054 - DNA, 93 bp, Zea mays
  Clone ID: LIB3180-041-P2-M2-B8
tttttcgtcttgggccactttcttagtcccctgtagccggcgcctaccgcttgggctttcctgcgttcgggaaggtgtttgcatggctggaga

SEQ ID NO: 29055 - DNA, 249 bp, Zea mays
  Clone ID: LIB3180-041-P2-M2-B9
ttgccgcactttcctgcgacgccaccaccacacgttcacggtagcgagagcttatcgtcgtcggcggcgaagatggtgtcgctgaagctgcagaagcggctcgccgtgagcgtcctcaagtgtgggaaaggcaaagtctggcttgaccccaatgaagtcagcgagatctccatggctaactcccgccagaacatccggaaattggttaaggatgggtttatcatcaggatgccttaaaaggttcacttt

SEQ ID NO: 29056 - DNA, 220 bp, Zea mays
  Clone ID: LIB3180-041-P2-M2-C1
ctccccaatcgcggcggtgtccactcccgccgtcccacatcagcttcgcatcggctgctcccgccgccgcgcccggcgcatcgttgccatggctggatccggcaagttcttcgtcggaggcaactggaagtgcaatggaacaaaggactccattagcaaacttgtctctgaattgaatgctgctacccttgaaactgatgtagatgttgtgggggcacct

SEQ ID NO: 29057 - DNA, 228 bp, Zea mays
  Clone ID: LIB3180-041-P2-M2-C10
ccgctgtgggccaggttgtattcactgctgaggatgctgaaacatggcattcccaagggaaatcagttattctggtgagggcggagaccagccctgaggacgtcggcggcatgcacgcggctgccggaatcctcacagaaagagggggcatgacctcccatgccgccgtggtggcacgcggttggggaaaatgctgggtcttgggatgctctgggattcgggttaatg

SEQ ID NO: 29058 - DNA, 388 bp, Zea mays
  Clone ID: LIB3180-041-P2-M2-C11
cttcagaccattagctttatctactccagagcgcagaagaacccgatcgacaccatgagggtgttgctcgttgccctcgctctcctggctctcgctgcgagcgccacctccacgcatacaagcggcggctgcggctgccagccaccgccgccggttcatctaccgccgccggtgcatttgccacctccggttcacctgccacctccggtgcatctcccaccgccggtccacctgccgtcgccggtccacctgccatcgccggtccttgtgccgtcggcgtgtcatctgccggcgtcaccatgccactaccctacttataccgccctgtcttagccttatccccatgccacacctatgcccgggccaacagtcgctttcaaactctgtg

SEQ ID NO: 29059 - DNA, 418 bp, Zea mays
  Clone ID: LIB3180-041-P2-M2-C12
aaagatgggcatcgtaggcatcgttctcggtctcgttcaaggggtagagatcgaagatctaggtcacgttcaagaagcaagcgagttagtggattcgatgcgccacccccgcaagcaatgggttcaacatttccagttattccaaccccaagtcagttaccaggctcttcgcttcctaacattggtggcatgtttccaaacatgctccctttcggggttgctgggcagatcaatccccttgtcatccagccacaagcaatgactcaacaggctactcgtcatgctcggcgtgtttatgtcggtggccttcctccatctgccaacgaacagacagtggcaatttactttaatcaagacatggctgctattggtggaaacactgctggtccaagggatgctgttctcaatggatacataa

SEQ ID NO: 29060 - DNA, 441 bp, Zea mays
  Clone ID: LIB3180-041-P2-M2-C2
ttactttcgaattctaccgtaatggtgatctttatggactcgaaaaatactgggcatttcaccattaccgaaatccagatagcggtcctgtagataaacttccagagctggagaggcttctgagggaggagttccagaccctagaggacttcaaggcaaaggagaaagcccgagcgacgacggagaaaggaactggcatcagtagcagcagtgtggtggtggccgcaagtcatagcaaggctgagactaagcaggtctgagtcccgcatgaaaattttcggtggtcgccccagcaaaaagaggaagtagcgttttctttttctttgcgaagaagtaatgattcgggtagacatgtgcagattttgctatatcccctgccagtgccgtgtgttgtggctgcccagaaattttccctccttttctcattacctgcctggcacc

SEQ ID NO: 29061 - DNA, 356 bp, Zea mays
  Clone ID: LIB3180-041-P2-M2-C3
cggcggccagcgaggccatgctcatgatcgagcgcctgcagcgggagaaggccgccgcgcaaatggaggcccgccagttcaagcgctacgccgagggccgcgaggacagggagcgcgaggtccaggaggagctcgcctcgctctccgacctcgccgcctcctaccactcccgcctccagtcccacggcatcgacccggactccttcaccgacgacgacgatgacgagtcgtactcgtacgaggaggtgggcgccgaagacgtggagcagatcggcatggccgcgctgcaagtggagcggaacgttcgcgactcgggcagtggcatggaggtgaaagcccatggccgtggcaatgac

SEQ ID NO: 29062 - DNA, 403 bp, Zea mays
  Clone ID: LIB3180-041-P2-M2-C4
atgtggagcttattcaaaaagttatgtctggggaagagataaagctggaagacctctctgattgtgaaatcaaacgattccgtcaagctctggcctcaggtgagctcagtaagatgattgaaccgtggacaccttggtggaaaaaaccctcagccagatctatttcccttggcctggatggaagtcagcttatcagacaagtaaacgcagaagacactgctgtaccatatccagatccaaatactgaccaagaggctagcatcaacgaaatccctgaagggccagaatctcctctcccggcattgaaacaggtaacaaggacagagccatttcctttgcttgctggccacttggttgacaattctgaacaggtactgtttaaacttcggctctacaacggggt

SEQ ID NO: 29063 - DNA, 277 bp, Zea mays
  Clone ID: LIB3180-041-P2-M2-C5
ctcctctcctcttctccctcgtcggtgcggcgtggcgcggctcggcgttcggtgagaaaccactcggggatgaggatctgctgctagagtgagaggagctacggtcagtatcctctgccttcgtcggcggcggaagtggaggggaggaagcgatggaggcgagcgccgggctggtggccggctcccacaaccgcaacgagctcgtcgtcatccgccgcgacggctatccctggccgaatccgtcgcggaagcagatacggacaggttgtccagattt

SEQ ID NO: 29064 - DNA, 235 bp, Zea mays
  Clone ID: LIB3180-041-P2-M2-C7
tcggcaacatagaaagcacaatagtgtaccaacaatggcagctaaaatattttgcctccttatgctccttggtctttctgcaagtgctgctacggcgaccattttcccacaatgctcacaagctcctatagcttcccttcttcccccgtacctctcaccaacggtgtcttcggtatgtgaaaacccaattcttcaaccctacaggatccaacaggcaatcgcagctggcatttta

SEQ ID NO: 29065 - DNA, 96 bp, Zea mays
  unsure at all n locations
  Clone ID: LIB3180-041-P2-M2-C8
cccttctgcccagcttattcaatccaagcgcctggttggattgggatcccatgggcaagcttggcctncttcttcttcttggcgggggcgggttcg

SEQ ID NO: 29066 - DNA, 180 bp, Zea mays
  Clone ID: LIB3180-041-P2-M2-C9
gggggagatgaaggttgtggtcaggacagttatttcactcaccaaggaggaggagaaagaactcaaggaaaccttgcaggatatccttggggaaaacaaaactattttggttgaacagaagattgactacagcatcatgggaggattagtgattgaatttgggcagaacgtgctttgtta

SEQ ID NO: 29067 - DNA, 443 bp, Zea mays
  Clone ID: LIB3180-041-P2-M2-D1
ggcccccactaacttaaaacctctcgtcacttgtctccttcccccgattcgcctatgatgatttcctctgttctctgccctccggccgccggcgccgccgcccccgtcaccggagcgggcgcgccacctatcatagggtctcgctccagttccctccatcctcctccccccgccgcctcccgtatccacctcccccgcctaccgccgccaccttttccctgttcctccagtacacccaccagccccttccccagccacgcttccttcgcactccaacccttcgacgaggttctctcctccatgtccccgcgggaacagacctcccttctctcgcggcagcgctgctggcgccgcgccagggaccttttaaaccgcctgcgcgcgctccccggatacgcccccaaccccgtccatgacgccgtcctcctgcgccacctagcccg

SEQ ID NO: 29068 - DNA, 130 bp, Zea mays
  Clone ID: LIB3180-041-P2-M2-D10
tcgccacgcgtccgcttaatcgcaataaagggtcgatgactgttaaattgcctgcacggctgcacaccatgtaacagcaaccgattcgattttctgtgaaggacaacgtgttcagtgtcggctgttccac

SEQ ID NO: 29069 - DNA, 296 bp, Zea mays
  Clone ID: LIB3180-041-P2-M2-D11
tcgcacaccgatttcatcatcaccagcacattccaagaaatcgcgggaggcatggacaccgtggggcagtacgagtcccacatcgcgttcactcttcctgggctctaccgggtcgtccatggcatcgatgttttcgatcccaagttcaacattgtctctcctggagcagacatgagtgtttactacccgtatacggaaaccgacaagagactcactgccttccatcctgaaatcgaggagctcatctacagcgacgttgagaactccgagcacaagttcgtgctgaaggacaagaa

SEQ ID NO: 29070 - DNA, 267 bp, Zea mays
  Clone ID: LIB3180-041-P2-M2-D12
tcgggcagtgtccctctcgttctcggccatcttcttcctttcctccattccatgaaggagaagaagacatatatatcatagaatgatagtatgacggaggcttgacagccgcacatcacatggatccttctgtttccgtttgccgcctccacccgggcgtcgccgttaccggcttatgccccgtctgcctacgtgaccgcttattcggcctccaccctacctccgccgttgaccttacgccgttgtaagtccttctactacgcgcgc

SEQ ID NO: 29071 - DNA, 362 bp, Zea mays
  Clone ID: LIB3180-041-P2-M2-D2
ggttggcttctcctcccccaccggttcgtgttcaggttctggttcgtgggcgagagggaagagatggcggcgtcggacgttgagtaccgttgcttcgttggcggcctcgcctgggccaccgacgaccactccctcaacaacgccttcagcacctacggcgaggtcctcgagtcgaagatcatcctggatcgggagacgcagaggtcccgcggcttcggcttcgtcaccttctccacggaggacgcgattcgcatcgccatcgagggcatgaacggtaaggagcttgacggccgcaacatcaccgttaacgaggcccaatcccgctgcggccgtggaggcggcggtggcggttactgtggcgg

SEQ ID NO: 29072 - DNA, 381 bp, Zea mays
  Clone ID: LIB3180-041-P2-M2-D3
tcgcacacacagccccatcccgccgccgcaggcgagaaccagcgccaccttaggttagggcggccgccgccggagaagtgcgcggttgccaagatgcagatcttcgtgaagaccctgacggggaagaccatcacgctggaggtggagtcctcggacaccatcgacaacgtgaaggccaagatccaggacaaggagggcattccgccggaccagcagcgccttatattcgccggcaagcagctcgaggatggccgcaccctttccgactacaacatccagaaggagtggacgctgcacctggtgctccgccttaagggaggcgccaagaagcgcatgaagataacgtacaccaagcctaagatgatcaagcacaagctcaag

SEQ ID NO: 29073 - DNA, 382 bp, Zea mays
  Clone ID: LIB3180-041-P2-M2-D4
tgaaaagcgtggaggggcttggatgaatgtagtcttttctcgaagtcgcgtgctagctcgcaatggtttggctgctaggctgcctgttgcccatatagtgtgcaatcagactccaccagttggcgagaagcccagtctcatgaccttccgtgaggttgaaactgggttccatgaattggggcacgcccttcagcacatgcttactaaacaagatgaaggctttgttgctggcattcggggagttgaatgggatgctgtagagttaccctcccagttcatggagaactggtgctattacaagaatactcttttgagcattgcaaaacattatgaaacccgggaaactctgccagaggaatttaatgctaagcttgtagctgca

SEQ ID NO: 29074 - DNA, 268 bp, Zea mays
  Clone ID: LIB3180-041-P2-M2-D6
gtcacacttggttgaccccttgcacgtcctgctggcggcgtctctaaaggccggacgagtctggcctgctgctcctggagcgcttgggagttatggccatggacgacctcccgggcgcctcctgctctacatcttcctccatggcggcggctgcctcctccgacccctcggacggctggcagacggcgtcgtatcccaagcgcaaccgcaagcaggcgcagccgccccgtaccacggggcccgatctggcgctgcagtccaacggcaa

SEQ ID NO: 29075 - DNA, 392 bp, Zea mays
  Clone ID: LIB3180-041-P2-M2-D7
attgacaccaccaacgcacgcacgacccttcttcctcctcccggcggctaggctaccgctattgatttctccttgcatcgcctttattgcgctcacctgctctgccaagtgccaacgtcgtacacctccagcagtggagggagccggagcacgagctgcccgctggacgaaccgtcgccgccacaaaaatctacatataattgcagccccaaccacctcgttcctcttccccttcccccctccccagccaaatccgctttcctagctttaatcgccgccgatctcgccggaggaactgctagctagatgctcccttcacttttcaggagccaggattaaaagttgccttaagaagaagatccctttgcgccgctgcatgttgagcgagccta

SEQ ID NO: 29076 - DNA, 279 bp, Zea mays
  Clone ID: LIB3180-041-P2-M2-D8
agtggaccgaccatggccaccgccgccgacatccgcgtttccatcggctaccaaacccgcttcgggctccgcctcgccgccgcgctctcctccccacccccatcccccgccagcaactccgccttctccccgctctccctccacgtcgcgctcagcctcctcgccgccggcgcgggtggcgccacgcgcgaccagctcgccgccgccctcggaggcgacgcgcccgccggggccgactgcctagatcgctttcgccgagctggtcgtgcagtttggggt

SEQ ID NO: 29077 - DNA, 396 bp, Zea mays
  Clone ID: LIB3180-041-P2-M2-D9
ggagaaggctgcagctcacttgaagggtggtgccaagaaggttgtcatctctgctcctagcaaggatgcccccatgtttgtcgttggtgtcaacgagaaggagtacaagtctgacattaacattgtctccaatgctagctgcacaaccaactgccttgctcctcttgctaaggtcatcaatgacaagttcggtatcgttgagggtctgatgaccactgtccatgccatcactgctacccagaagactgttgatgggccctcgtctaaggactggaggggtggaagggctgctagtttcaacatcattcccagcatcactggagctgcttaggctgttggcaaagtgctttctgtccttaacggaaagttgactggaatgtctttccgtgtcccaac

SEQ ID NO: 29078 - DNA, 413 bp, Zea mays
  Clone ID: LIB3180-041-P2-M2-E1
cgccaccaggtgcagagtctttcgtcatgtcttctccggcgaagaacccccagtcgcccaccagatcacttgttaaactttgttgaggggtgatggcggtttctttcgcaaacctcaacaccgaggcagggcttaaaaagcttgatgagtaccttctcactcgcagctacatcactggctaccaagcttccaaggatgacttggctgtctacacttcgttttcgtctgctccctcgtccaagtatatcaacgtagcaaggtggtttaatcacattgatgcgctcgtgaggctgagcggaattactgcagagggccaaggtgtgaaggttgaatcctcagcagttccttcagccccaactccagatgttgctgaagcacaggccccagctgctgaggaggaggacgatgatgat

SEQ ID NO: 29079 - DNA, 179 bp, Zea mays
  Clone ID: LIB3180-041-P2-M2-E10
tcggtagactgtagttctgttcctccccactcactcctgcgcttactagccgcgcggatccttctccctgatcctcctttggcttcgcggttcatggcgatgtggagggccaacgctaggcagttggtcgaccggacgctcggatcaagggcacggcacacgtttacaggcagcaaaaa

SEQ ID NO: 29080 - DNA, 129 bp, Zea mays
  Clone ID: LIB3180-041-P2-M2-E11
tctttcggatcagcaaagcggcagtgcgtagagaggatcgtcgaacagaacagtatgaagatggtcatcgttctcgtcgtgtgcctgtctatgtcagctgccaacgcctttgcaatgcagatgccctgc

SEQ ID NO: 29081 - DNA, 246 bp, Zea mays
  Clone ID: LIB3180-041-P2-M2-E12
gcaccccgatcctgggccagtgcgtcgagttcctgaggcatcagtgcagcccgacggcgacgccctactgctcgcctcagtgccagtcgttgcggcagcagtgttgccagcagctcatgcaggtggagccgcagcaccggtaccaggcgatcttcggcttggacctccagtccatcctgcagcagcagccgcaatgcggccagttcgcggggctgttgtcggcgcaaatagcgctgtatctgactg

SEQ ID NO: 29082 - DNA, 320 bp, Zea mays
  Clone ID: LIB3180-041-P2-M2-E2
tcgcgcacgcgtaaacgcaaaaccatatcctggggctttatctccggccacagctgggcaggttagcggcgaaagatgagcaggaactggagccgaacgatctacgtagggaacctccccggcacatccgggagagggaggctaaggtttagaagccatcggttacaccacctcctaaagttgattatgccactgatctctttaacatgttgtcaatggatggaacaacagagaaagagtcagcttcatcttcaaacgacgataatggctgggatggctttcaggttgtacaaccagaacctagttcagagaaaaatgat

SEQ ID NO: 29083 - DNA, 324 bp, Zea mays
  Clone ID: LIB3180-041-P2-M2-E3
ccttgcccctcctcccctccgccgttcggcccagtccccacctcacctgggcaaccccctccttggatagggttagagttcccccggcacgagcgcgagccatggcctccttcacctgctcccaggtcggcgctgcggcagcgggcggagcctcgcccttcctcggctaccggcggcggagcggccctgggggcgccattccgtcgagctccctcttcgtgggccggcggttggcggcggtgcagatgcgcgcgcccttttgcggggttcgcgggggctccgggcttgcggtcacgtgcgaaaagggtggtggggtatcgccct

SEQ ID NO: 29084 - DNA, 429 bp, Zea mays
  Clone ID: LIB3180-041-P2-M2-E4
tcgccacgagttccttccagaagggaacatcgaggacattgtaagtgaattatgtgctgagacgggagccaaccaggaggatgccctcgcgcgaattgaaaagctttcagaagtaaacccgatgcttggcttccgtgggtgcaggcttggtatatcgtaccctgaattgacagagatgcaagcccgggccatttttgaagctgctatagcaatgaccaaccagggtgttcaagtgttcccagagataatggttcctcttgttggaacaccacaggaactggggcatcaagtgactcttatccgccaagttgctgagaaagtgttcgccaatgtgggcaagactatcgggtacaaaggtggaacaatgattgagatccccagggcaagctctggtggctgatgagatagcggagcatgctgaatttttct

SEQ ID NO: 29085 - DNA, 392 bp, Zea mays
  Clone ID: LIB3180-041-P2-M2-E5
tcgtatgcatgcgcgacacgagtcggccaggaccgtgagatgatgattgagccagtgatgtggtgccacccacaagatgcagatggtggacgtactgaaggatggtggacttaaccaggggatactcgccgtgcgagtaccctcccccagcaaacactatctaagtgtgaaattaaaggaccgcgagatgatgattgagccagtgatgtggtgccacccacaagatgcagatgggggacgtactgaaggatggtggacttaaccagtggatactcgccgagcgagtaccctcccccagtaaacactatgtaagtgttaaattaaaggcaagccccggttttatgcataacctgttattattgctattttacttcacttaatgattgtaggat

SEQ ID NO: 29086 - DNA, 427 bp, Zea mays
  Clone ID: LIB3180-041-P2-M2-E6
attgagaccaactagcaacatagaaagcacaatagtgtaccaacaacggcagccaaaatattttgcctccttatgctccttggtctttctgcaagagctgctacggcgaccattttcccgaaatgctcgcaagctcctatagcttcccttcttcccccgtacctgtcaccagcggtgtgttcggtatgtgaaaacccaattcttcaaccctacatggatccaacaggcattcacagctggcatcttacctttatcacccttgttcctccaacaatcatcagccctattacatcagttacctttggtgcatttattggctcaaaacatcagggcacaacaactacaacaacttgtgctagcaaaccttgctgcttactctcatcaacagcagtttcttccattcaaccaactatgcttgattgaactc

SEQ ID NO: 29087 - DNA, 235 bp, Zea mays
  Clone ID: LIB3180-041-P2-M2-E8
tcgcgcagccgcaaacgcgaaaccgtagcctggagctctatctccggccacagctggtcaggttagcggcgaaggatgagcaggcgctggagccgcacgatctacgtcgggaacctccccggcgacatccgggagagggaggtggaggatctgttctacaagtatggtaaaattgtggacattgacctgaagggccccccaagaccacctggttatgcttttgttgagttagaaa

SEQ ID NO: 29088 - DNA, 128 bp, Zea mays
  Clone ID: LIB3180-041-P2-M2-F1
tcgcgccgttgttgccgacacttcaacgcgtgcctcgcgcccccgcgctgctgatgcgatcagcgacacacgccagatccgagcttctgtaggaccttcagccgtccccgtcccatgggggactgcgt

SEQ ID NO: 29089 - DNA, 248 bp, Zea mays
  unsure at all n locations
  Clone ID: LIB3180-041-P2-M2-F10
ccccgatcaaccaggacctcatcagcaacttcttgtcggaccctgtccatggtgccattgaggtctgcgccgagctgaggcccaccgtcgacatctctgtgcctgccaacgccgactttgtgcgcccggagctccggcagtcttcctagattgaggcagngagcggagagggagagggagagagaaagagaggatttcgtgtcccgagttagaacagagtgctgtatgttttgggcgactgtgtgtaa

SEQ ID NO: 29090 - DNA, 192 bp, Zea mays
  Clone ID: LIB3180-041-P2-M2-F11
ctcagaaaaattattcatttgcacaaatatcttggtatggtctaaggtggattttgagtttccttcttatggaaggcatgacacactttttccactacaatgcctttgtagtaagccggctatggcagcagttatccccttttgaggttttcatcatcagttatggggtgttaaactttatgtgggtgaaat

SEQ ID NO: 29091 - DNA, 143 bp, Zea mays
  Clone ID: LIB3180-041-P2-M2-F12
gcagcatctgcatctctcgcccacctccgctccgcctgctgctgctggtggtagggaggcggaaaaggaggcccttgcgcccgcccgccggccggatcaaagccgtagcaaccaccacccatggcggacgtgcactaaccttt

SEQ ID NO: 29092 - DNA, 301 bp, Zea mays
  Clone ID: LIB3180-041-P2-M2-F4
ggagaaccggcgggctctccgtgagctcctgttctgctgccctggtgccctccagtacatcagcggtgtgatcctcttcgaggagaccctctaccagaagaccaaggatggcaagccttttgtcgatgtcctcaaggagggaggcgtcctccctggcatcaaggtcgacaagggcaccattgaggttgttggcaccgacatggagaccaccacccagggccactattaccttggaaagcgctgcgctaagtactacaaggccggtgcccgctttgccaagtggggtgctgttctcaagatt

SEQ ID NO: 29093 - DNA, 303 bp, Zea mays
  Clone ID: LIB3180-041-P2-M2-F5
gtcgttcggagcgggcagcagcacacagcgcggatcccaatcctagtcgagcttgttcccctcctcaaggaagaaaagaagctgaaccatggggaagagaaagtcagctgctaagccacctcctaagaagcggatggacatgcttgacactgacttttcctgcccattctgcaaccacgggagtagtgttgagtgccgaattgacatgaagaatctgattggcgaagcatcttgtagaatctgtcaggaaaacttcaggacaacgggtaatgcactcactgagcctatggatatatatagtga

SEQ ID NO: 29094 - DNA, 212 bp, Zea mays
  Clone ID: LIB3180-041-P2-M2-F6
catgttccacgcctgcgtctcgtgatgccgccgaaatcgaaggcgtccgccgccgcggagccggtggccgtcgaggacctctttgcctcgttccaccgccacattgaggcaggtgcttttaaacatggccgccaaggtcgccgaccaagttcttaaggcagcgccgggtgatgaggtcgcggagcgatgcaaggtggtggcatacattaagg

SEQ ID NO: 29095 - DNA, 430 bp, Zea mays
  Clone ID: LIB3180-041-P2-M2-F7
caacagcaacggcagcatttgccttgacattcttaaggaacagtggagtcctgctttaactatctcaaaggttctcctgtcaatctgctcactgctcacggacccaaaccctgatgatcctcttgtccctgagattgctcacatgtacaagaccgacagggccaagtatgagtccaccgcacgctcctggacacagaagtatgccatgggctagaagcaaggctaaaagctggccaaactggtgaatgtgccggaccccaaatcgttatcacctaaataaccagtcaagtcgcaagtatgaatggacttttgaggaccattgtgccctgttgaactcatgtattaccttgtgaagtccggtgtgtctggtttctacctgaccgtttcgttatctgatgctgtttctttaatatctgatgctgcttcatta

SEQ ID NO: 29096 - DNA, 431 bp, Zea mays
  Clone ID: LIB3180-041-P2-M2-F8
caacaagcaacatagaaagtggaatccagtagcaacaatagagcaacaatggcgaccaagatattttccctccttatgctccttgctctttctgcatgtgttgctaacgcgacaattttccctcaatgctcacaagctcctatagcttcccttcttcccccataccttccatcaatgatagcttcagtatgtgaaaacccagctcttcaaccctataggctccaacaagcaatcgcagcaagcaacatacctttatcacccttgtttcaacaatcgccagccctatctttggtgcagtcattggtacaaaccatcagggcacagcagctgcagcaactcgtgctacctgtgatcaaccaaagagctctggcaaacctttctccctactctcagcaacaacaatttcttccattcaaccaactgtctacatt

SEQ ID NO: 29097 - DNA, 220 bp, Zea mays
  Clone ID: LIB3180-041-P2-M2-F9
ggcgggttcgtcaagccgtcggggctgagcgcattggccgccggggaggccattgccaaggacaacaaagtttctgtcctgctgggtggttccgggccggcgctttacatggcctccgaccatgccgcgtgcagtcatccactggtgtttgaggtgctcgtggccgattcgatagccttggctcattctctggctgaaccctgggccgagtttcttcctt

SEQ ID NO: 29098 - DNA, 296 bp, Zea mays
  Clone ID: LIB3180-041-P2-M2-G1
tcggtctgcgtgaaactgaggaggaactgaggagactaaaagagaagctggggttgctgactgtggaactgaaaaaaaataaagttgtatggggacctgattggaaggttcgttttgcaaaaatttagcacccaaggatggtcaagggaccaaaaaaggcccagaagaattgaaagggggtctttgatgttgaacaaaggcaagaaaaagtgtggggtgcataaacccgcgtggtggttttaaaaaaggaaagggtcagcggtttagggacttggtttaaagacaaaatacacttt

SEQ ID NO: 29099 - DNA, 420 bp, Zea mays
  Clone ID: LIB3180-041-P2-M2-G10
gtgatgaacagtgaagagagtgcgcatgctcaagcaccaagttcagactacatcttgagagggaattatccagcacctgtcggtttcatgcctccaaactaccaacatctcagtaattctgcatttatcaacatgccgccgaccacagccagccaccagatccctctagcaagtgttcaagctagcggcttcgttgctcctccgttgcgtggtggtgctgtgatgcaatctgaccatcactcccagcagaagccctacagaaacatcatgcctgccatgcatcgcccaacctacatgatgaaagaagtgatcgtgatcaacgactctcctgagcgcagaagtgagccacatggtagcatgctgtttccccctgttccggctccaccacttccggtgttaccaaacaacatgccaccccgt

SEQ ID NO: 29100 - DNA, 339 bp, Zea mays
  Clone ID: LIB3180-041-P2-M2-G11
gtccaactggcctgactaccgaggggaagtctgttgagatgcaccacggggcgcttcatgaggctcttccgggtgacaatgttggcttcaacgtgaagaacgttgctgtcaaggatctcaagcgtgggtttgtggcctccaactccaaggatgaccctgccaaggaggctgccagctttacctcccaggtcatcatcatgaaccaccctgggcagattggcatcggctatgccccagtgctggactgccacacctcccacattggtgacaaggttgctgagctcattaccaagatcgacaggcggtttggcaaggagcttgtgaaggagccaaagttcc

SEQ ID NO: 29101 - DNA, 378 bp, Zea mays
  Clone ID: LIB3180-041-P2-M2-G12
gtgagagagggacgcggcctgttgtccgggcttttagacgcaacttccatcgctgcgaaactatccattcgtgttcgtcatggccgccagcgtcaccgtggaaaacctcaaccccaagggcttaaaatgtgagtatgcagcccgtggggagattggcatccatgctcagcgcctgcagcaacaactacaaacacaaccagggtctcttccttttgatgagatcctctattgcaatattgggaatccccaatctcttggtcagcaacctgtgacattcttcagggaggttcttgctctttgggatcatccgggcctgttggaaaaaggggaaaccaaatcattgtgtagggctgatgcaatttcttgagcaaagcaaat

SEQ ID NO: 29102 - DNA, 358 bp, Zea mays
  unsure at all n locations
  Clone ID: LIB3180-041-P2-M2-G2
gccgcactgaaccccgctgcttatttgcagcagcaaatactactaccatttagccagctagctgcagcaagccgtgcttccttcttgacacagcaacagttgctgcctttctaccagcagtttgcggctaaccccgcaaccctgttacaactacaacaattgttgccctttgtccaacttgctttgacaaacccagcagcctcctaccaacaacacatcattggtggtgccctcttttagattgcttattagttggaattcaataataaaagtttttggatgatgtatgtggccaaccagaaataagaagttacatttccagattctaaatatnaaaataaatattatatatataaat

SEQ ID NO: 29103 - DNA, 279 bp, Zea mays
  Clone ID: LIB3180-041-P2-M2-G3
cccctgtgtctctgtttaattggcgcccggccctgggaattagaaaaatccagaaaagtaattaggaaatgaatttctaatttaaaaataaatactaggacttgtttaattcatattaagtccaaatgagtccatttcagttcctggaattttataatattatggtttatcaaatagggccactgatttgacatgaaagccactttaaaattatttgctaattaatacataaaaccttagaaaattcggaactcctccgttttaaatctgatttgactc

SEQ ID NO: 29104 - DNA, 305 bp, Zea mays
  unsure at all n locations
  Clone ID: LIB3180-041-P2-M2-G5
cccacgcgtccgcccacgcgtccacccacgcgtccggtgagagagagagagaggcgaangcaactcaggcgacgcgatggcgatggcggcgctgcgacgcgaggggaggcgcctcatcctctcctccaccgtccccaacccgtctctggcggccgcttcctctgcggggacgcgatcctccgccgtctcgcatccggagatggctccacttggtgcacggtctatttcaactcaaatcgtgaggaaccggatgaaaagtgtcaggattatccaaaatatcacaaaggctatgaaaatggttgcag

SEQ ID NO: 29105 - DNA, 55 bp, Zea mays
  Clone ID: LIB3180-041-P2-M2-G6
ccattcgtttttcctacccctccggttcgaattcgggttggtgaggttctccggg

SEQ ID NO: 29106 - DNA, 269 bp, Zea mays
  Clone ID: LIB3180-041-P2-M2-G7
gctaggtttgcgctcatgtttgtttctctactaaaaaccttagatgaaggccccttttggcctcgccagaaaaaaaatactgtatgtttgcggggaagagtgtacattaattctgtagcagaaagaccccccctacccatgcggcggaatcaagggaggagtgatgcgtgcgagtccgatcgatcgatctgaaggctgctgtaaagaggaagatggaaggaaggagtgagaagcatgtcaggtactctgctgctgtacaaattaaactt

SEQ ID NO: 29107 - DNA, 373 bp, Zea mays
  unsure at all n locations
  Clone ID: LIB3180-041-P2-M2-G8
ttgatcgcgatgcggagnccttttgtttnttttttattttggaatgggtaagtgtttattttatattttttttattaaatttttttttttcatttattatggaatatttgttttatatttggatttaattattttttatttatttttattattaatttatatttttatatatttgtgtggattattattaatttttttttttttgtattatttagtagtatatttatttttttttaatatattatttatattttgtttttttttttttgtttttaatttatttgttttattattaggttattattttctgttagttatattaatattttttttattttaaatatatttttactttttttattataattatttt

SEQ ID NO: 29108 - DNA, 286 bp, Zea mays
  Clone ID: LIB3180-041-P2-M2-G9
cttcggcctttcctctcagtcctctctggccactccgcctggccgtccacacccccctctccgtgaaaattgctgagatggccatcgacaaggtggacgccaaggagagggagaagatcgaggccgttcgcaagctgctgtgcaagcaggcgccgctctccgcgaagcaggcgcagtactgcaacgacgcgtgcttggagcggttcctgcggtcgcggggggacagcgtcaagaaggcggcgaagcacctgaggacggtcctctcatggagggagagctgtcgagc

SEQ ID NO: 29109 - DNA, 129 bp, Zea mays
  Clone ID: LIB3180-041-P2-M2-H1
tctcgcgtttgtccgctacccctccccgaccagatcgccacgagacgccgcgcgatccgacccaagccgacgcctactacccctctcgccgccggcggccatggcgtacggagaccgcgtcaccacctt

SEQ ID NO: 29110 - DNA, 325 bp, Zea mays
  Clone ID: LIB3180-041-P2-M2-H10
atcaacatgaaaggtttggatggtatccagggccccatttatgtgggtactggatgtgtctccagaaggcaggcattatatggctacgatgctcccaaaacaaagatgccaccatcaagaacttgcaactgctggccaaagtggagcatttgctgttgttgttttggtaactggaagaccaagatgatgacctagacctctataccgaaatttgagaagatataaaaactttttatgaatatggaaaatgaaggcccctggttatgctcttggggtaaatgttgaaaccgctcctggagctgaaaatgaaaaggtgtgctttgta

SEQ ID NO: 29111 - DNA, 320 bp, Zea mays
  Clone ID: LIB3180-041-P2-M2-H11
tcgctcggcttctacggcgtaacgtaggaggcggcggttccaggcgaccatgcaataatcgccaccctcacgcgagaaatccccggagggattctttggctgaggttgccctcggattgttccaaaaacgaaaaagttagccctcttcctcaggtccaatttggcagcttttgctacacgatccattaactgctttccgatccgtagttctgagaagtttgccctcttcctcatggccaatttggcattttgtataaacacacacaggcaacttttggtgaactacacgcggtatggagctttatttaaaattccagggg

SEQ ID NO: 29112 - DNA, 234 bp, Zea mays
  unsure at all n locations
  Clone ID: LIB3180-041-P2-M2-H2
tcggcgccttcacatctcgtctctcaaatcgggaggcggaaccaaggcatacatatacatgatttgagnggnaccatcataacaagtaaagatggtgaagttcacggctgaagagctccgtgccatcatggacaaaaagaacaacattcgtaatatgtctgatattgctcatgtggaccatggcaagggtacacttacagattcccttgtggcagctgctgggattattgccca

SEQ ID NO: 29113 - DNA, 94 bp, Zea mays
  Clone ID: LIB3180-041-P2-M2-H4
acccaccatccccgatcgcccttggagatggagatggtcggaagtaggggcggggccatccaaggcctatggtaatacggatgggacttgcttt

SEQ ID NO: 29114 - DNA, 170 bp, Zea mays
  unsure at all n locations
  Clone ID: LIB3180-041-P2-M2-H5
agggaaagaaggnacgccggcaggnacgggaccggaannaacagggagacccacgcgaccgcgagagacgggcaggggagaggaaaaaaaaagaggaacccnagcanccggagggcgagggnacgggggaagcgaaggcggcggcggaaagacagcgggggacggagaag

SEQ ID NO: 29115 - DNA, 174 bp, Zea mays
  Clone ID: LIB3180-041-P2-M2-H6
ttttacccggtggtttaaaccctagttcccattccatcttcgtttccggtccggcgccgacaatggagttctgggggctcgagggcaaacctggatcccactgtaaggtgtgagccctggacattggcttttatccttgcaccgtttccccagggctggcccttggggggaatt

SEQ ID NO: 29116 - DNA, 430 bp, Zea mays
  Clone ID: LIB3180-041-P2-M2-H7
gggctagttgatgaggaggcaatccccaagtatgaactcacagtcgaggatggtcggcgacttgctaaagaatacagtcgtgtactaatgcggcggcaccgtgcaaggcaaacagcagagtcaatgcttctaaccctaaaaaaggaggccgttgatgctctccctgagaagctacgagctgctgctatggtacctgacatgacaccgttccctgcaaaccggtacatggcgacactcacaccaccaattgaaggatatattgaaaaagtgcgggaagcggccaagaagcactctgtgaaggagaaacttcgctgagaattcaagagaggaaactgtttccgtaaggggaataaatattcaacctaatgtacaagaacagctttggcacaaactgcaattgccatatttggtgatctagtcaggcattcca

SEQ ID NO: 29117 - DNA, 374 bp, Zea mays
  unsure at all n locations
  Clone ID: LIB3180-041-P2-M2-H8
tccttgacaagggtgaggcagttaatttgtgggaaaggtgcagttgtgacagcggatcnaatcgtgactgtcagtaagggttattcgtgggaggtcacaactgctgaaggtggacagggcctcaatgagctcttaagctccagaaagagtgtattaaacggaattgtaaatggaattgacattaatgattggaaccctgccacagacaaatgtatcccctgtcattattctgttgatgacctctctggaaaggccaaatgtaaaggtgcattgcagaaggagctgggtttacctataaggcctgatgttcctctgattggctttattggaaggttggattatcaaaaagggcattgatctcattcaacttatta

SEQ ID NO: 29118 - DNA, 436 bp, Zea mays
  Clone ID: LIB3180-041-P2-M2-H9
cgaagcccaccgaattccctgcgattcctctcccctcgcctcctcgtctccccctaggggatcgtcggagaggaatcgcaaagagggccgtctcatccgagttaaggaagccatggagcacaaggaggctgggtgccaggcccccgagggacccatcctctgcatcaataactgtggcttcttcggcagcgcggcgaccatgaacatgtgctctaagtgccacaaggagatgataacgaagcaggatcaggccaagctggctgcctcctctatcgacagcatcgtgaacggcagcgacgccgtcatggagccggttgttgctggcagcaacacggtagaagctgttgcccaagtcgagttgcaaacattgaacgtgcagcagcccgctgatgttgccggacccaccaagggggtggcggtgatctccaaaaggggg

SEQ ID NO: 29119 - DNA, 362 bp, Zea mays
  Clone ID: LIB3180-042-P2-M2-A1
ttgagcattcagaaacacaccaagcgaagcgcactggcaacaacctaacaacagtgggtgccaagatattatccctccttgcgcttcttgcgctttttgcgagcgcaacaaatgcgtccattattccacaatgctcacttgctcctagttccattattccacagttcctcccaccagttacttcaatggccttcgaacacccagctgtgcaagcctataggctacaacaagcgattgcggcgagcgtcttacaacaaccaattgcccaattgcaacaacaatccttggcacatctaacaatacaaaccatcgcaacgcaacagcaacaacagttcctaccagcactgagccacctagccatg

SEQ ID NO: 29120 - DNA, 380 bp, Zea mays
  Clone ID: LIB3180-042-P2-M2-A10
tattcatccgtcctgcgattttcgggggcggcgtgtctccgatcttggtccggcgttagagaacaagacgaggtcgaggacccagacgcagacgcacacgcagcgcgccttctccaccgcgaagtcatcgttccgcgctgccgccgccgccctagcaaggtgttggattctgtgttgcggcttcggagtgtcattgctacccttctcctgacaacatggtttctttcgagatgaatgacctcaagaagattgggctaggcctaacaggctttggaatattcttctccttcctgggaatcattttcttctttgacaagggtcttattgcaatgggcaatatcctctttctatctggtttgggtttgacaattggtttgaaa

SEQ ID NO: 29121 - DNA, 179 bp, Zea mays
  Clone ID: LIB3180-042-P2-M2-A11
tctttcttctcctcctcctcctccccagaaagggccgcacttacaccaatcgtggtcggggcccaaactcccgaaatcccggcccgctttcacgaccgatcgccccgagccttggtccttcccggcctctgattctcggccccctttcccgtgcttcctgcgaaaaatactctacctca

SEQ ID NO: 29122 - DNA, 272 bp, Zea mays
  Clone ID: LIB3180-042-P2-M2-A12
ggaggagaaaaaacaaggagcgagacctggcagctgacgcgcacagggcagaacccaatcggagccgtggaccgggccggagatagggctcgaggccatggcaagcggaggcgagggcgcagggagcggcgagtccccacccgctgcctcagtggaggcggcagcgggggaggcgacgctgcacatccggtgcgcgaacggctctaagttcacggtgcagacggacctgggcgccacggtgggcgggttcaaggagggtcgaaccgggagct

SEQ ID NO: 29123 - DNA, 333 bp, Zea mays
  Clone ID: LIB3180-042-P2-M2-A2
tagactatcaagttttctctgctggtctggctgcggggagttggcatggggtgaggtgccgacctcaagctaaactgcctcgggtccgttctttccggactcgccatcgccaccacttgtgtcggccaaattctcacgaatactatacagaggaagctgaaggtctcgtcaacgcagctcctgtaccagtcagcgccttaccaagcagccattctgttcgccactggccccttcgtggaccatctcctcaccggccgcagcgtcttcgcccatagatacactttcccggttgtgggcttcatcgtcctgtcgtgcttgatcgcggtgtcggtg

SEQ ID NO: 29124 - DNA, 381 bp, Zea mays
  Clone ID: LIB3180-042-P2-M2-A4
aacccttctttttttgaccattaaaaaacacaccaagcgaggggcattaccaacaacctaggacggttggttaccaaaatattacccctccttgccctttttgccctttttgtgagcccaacaaatgcgttcattattccacaatgctaacttgctcctagtgccattattccacagttcctcccaccagttacttcaatgggcttcgaacacctagctgtgcaagccaacatgcaacaacaagcgcttgcggcgagcgtcttacaacaaccaattgcccaattgcaacaacaatccttgccacatctaacaatacaagccatcacaacgcaacagcaacaacagttcctaccagcactgagccacctagccatggtgaac

SEQ ID NO: 29125 - DNA, 430 bp, Zea mays
  Clone ID: LIB3180-042-P2-M2-A5
ttcttcagcaactcgtgctaccagtgatcggccaggtatctctggcaaacctgtctgcctactctcagcaacaacaatttcttccattcaaccaactgtctacactgaaccctgctgcttatttgcagcaacaacaactactaccattcagccagctagctactgcctactctcagcagcaacaatttcttccatttaaccaattcgccgcactgaacccctctgcttatttccagcagcaaatactactaccatttggccagctagctacaacaagccccgcttccttcttgacacaacaacaattgcttccgttctaccagcagtttgtggctaaccccgcaacccttttacaactgcaacagttgctgccctttgtccaacttgctttgacaaacccagcagccttctaccaacaacacatcattgg

SEQ ID NO: 29126 - DNA, 307 bp, Zea mays
  Clone ID: LIB3180-042-P2-M2-A6
ttctttatctactccaaaccccaaaaaaaggcgggcgacaccatgagggtgggtctggttgccctcactctcctggctctcgctgcgagcgccacctccacccatacaagcggcggctgcggctgccagccaccgccgttctttcatctaccgccgccggtgcatctgccacctccggttcacctgccaccttccttgcatcttccaccgctcttccaccttccgccgcctttccacctgccaccgtctgtccatgttcccccctcgtttcatctgccgccgccaccattccactacactacttaac

SEQ ID NO: 29127 - DNA, 307 bp, Zea mays
  unsure at all n locations
  Clone ID: LIB3180-042-P2-M2-A7
ttgcgtagctcaagttcgcctccgccaaacgccttgacctacgaaccgtgccggctcctttgccggcgttncttccacttcttgccctttttacgagcgcaacaaattcctccattattccacaatgctcactcgctcctagttccattattccacagctcctcccaccagtaacttcaatggccttcgaacacccagctgtgcaagcctataggctacaacaagcgattgctgctagcgttttacaacaaccaattgcccaattgcaacaacaatccttggcacatttaacaatacaaaccatttt

SEQ ID NO: 29128 - DNA, 386 bp, Zea mays
  Clone ID: LIB3180-042-P2-M2-A8
tctgcttcgcgtctccctccccccgggtccggcgtccgtcccgggagaaggcaagacacggccatggaaggctaccaccgcgagttctaccagttcagcgaccagctgcgcctgcagacggccgccttctcgggcctatccctcggcgactccatctggtcccccgccggccggcgcaacaacagcaacgacgtccttttcgccgccttcgtgtcgcccgccgacgccgcctgcaagaacaaccccgtagtcgggcttaagctcaaccaccgagggcccggccttatcggtttcgggaagctggccctttggggctcccgaggcggggggaccaacaagggcgaacttctcaacaacaacaacctttccaacatcgacaacaagaa

SEQ ID NO: 29129 - DNA, 370 bp, Zea mays
  Clone ID: LIB3180-042-P2-M2-B1
ttgtcattgataagggcactggaaagaaacagggcatcaccatcactggtggtaggacgttacctaaggatgaggttgagagaatggtagaagaagccgataagtttgccaaggaggacaaagagaagagagatgcaattgacacaaaaaatcaggccgattctgtggtctaccagactgagaagcaactgaaggagcttggcgataaagtccccgctcccgtgaaagagaaggtggatgtgaagctccaggagctcaaagaggcaatatctggtggatcaacacagagtatgaaggatgccatgtctgctttgaaccaggaggtgatgcagattggccaggcaatgtataaccagtctggtgccagtgc

SEQ ID NO: 29130 - DNA, 95 bp, Zea mays
  Clone ID: LIB3180-042-P2-M2-B10
ttttctagatcgcaaacagcctcccttttgtgatcatttttaacatggggagggcatttttataaatctttctttacacacatttaatatcctaa

SEQ ID NO: 29131 - DNA, 475 bp, Zea mays
  Clone ID: LIB3180-042-P2-M2-B11
ttttcctgtcagtattagagtgagagtgaggcatctagtgggagacaagttgagatttttaaggtatctcaaggtagctattcgtcggctgcggtcgtgtagttgtagtataacattgcggcgtgtttgtttgctattatcacctttaagatcatgctcttcatgctcccttctctttttctttattattttctttttcgctttaatgcagtttttattttttgcatttttttgtactatctattgtttattctcttttctttttttcttgtttattttttctttgttttttttttttttttttttcgtttttttttttttcttgtttactatcttttttattttttcttttattttttttttttttttattatcttatttttttaactttattttatatttttttatttattctatttttatatatttctatttttattttctttatttatatttattatttttttattttttt

SEQ ID NO: 29132 - DNA, 413 bp, Zea mays
  Clone ID: LIB3180-042-P2-M2-B2
caatattgtaccaataatggcagccaaaatattgggcctcattatgctccggggggggtctgcaagtgctgctacagccagcattttcccgcaatgctcacaagctcctatagcttcccttcttcccccatacctctcaccagcgatgtcttcagtatgtgaaaatccaattcttctaccctacaggatccaacaggcaatcgcagcaggcatcttacctttatcacccttgttcctccaacaatcatcagccctattacagcagttacctttggtgcatttattggcacaaaacatcagggcacaacaactacaacaactcgtgctagcaaaccttgctgcctactctcagcaacagcagttacctttggtgcatttgttggcacaaaacatcagggcacaacaactacaac

SEQ ID NO: 29133 - DNA, 276 bp, Zea mays
  Clone ID: LIB3180-042-P2-M2-B3
ttgggtcttcagaccattagctttatctgctccagagcgcataagagacccgagcgacaccatgagggtgttgctcgttgccctcgttctcctggctctcgctgcgagcgccaccttcacgcatacaagcggcggttgcggctgccagccaccgccgccggttcatctaccgcctccggggcatctgccacctccgggtcacctgccacctccggtgcattttctaccgctggtccacctgccgattatcttccatttttcatcagctacctttgt

SEQ ID NO: 29134 - DNA, 208 bp, Zea mays
  Clone ID: LIB3180-042-P2-M2-B4
tctttcttcttttttttataccattatctttatctactccgagactcataaaaacccgtgctgcaccattaaatatttcctcttttccctttctttcctaactctcacttctactaccatctccactcattcaatcatttatttatttttttattcaccttcttcttttcaactactatcttacttcctttttttttcatccattttt

SEQ ID NO: 29135 - DNA, 299 bp, Zea mays
  Clone ID: LIB3180-042-P2-M2-B5
gcaactaacgcgatcgcgcgccgacaacgacgcgcggtgccggcgcctttgttgcggtgttacaaactccgctgcatcgcctcggtcggtcgtcgtcatatcatgggtgtccggctgccggtggcgtggtccgccgtcctcgtcctcctcgtgcgggcggccgtggctcgtgagtactcggccatctttaactttggggactccctggtggactccggcaacctgttggttgacggtatctcgtactacctggccacggtgctcttgccctacggcatgacccacttcggttaccctac

SEQ ID NO: 29136 - DNA, 208 bp, Zea mays
  Clone ID: LIB3180-042-P2-M2-B6
tcagtagcttctgcttgctctggggggaaggagagagagagagagcgatggggagatctattatatagcttagtttgtggtccttgaacgaagatgttgtcattattcatctgtctcttttttgtggttgtttttttttttctttttttttcttttattcttgttttcctatttttttatttatcttttttttctattatttatttaa

SEQ ID NO: 29137 - DNA, 294 bp, Zea mays
  Clone ID: LIB3180-042-P2-M2-B7
ttattgctgctgcagtcctccataacttaggtcggtcacataatgggggtgggagatccctagaaaatgatcaaggaaatatcaacccgcaaagttttgtcagcctacccaatagtgaccatggaaatgatgaagggaatatggaagggaataacttaagagatatgatagcttatcatatgtgggcagattatgagcaacttaaaaatcaatgaatcattcctgtaatggatattgggtaatcaataaatgtcatttttgtaatggatattttgtaattgatattttgtgaac

SEQ ID NO: 29138 - DNA, 137 bp, Zea mays
  unsure at all n locations
  Clone ID: LIB3180-042-P2-M2-B8
ttttctagatcaccagcgtccaccctttttttttttaccctcgcgtgggggggcccaaaaaccctanccccccccgcatccaaacccatgcccgcacacacctccacgtccttcttctttccggcaacccaccaacc

SEQ ID NO: 29139 - DNA, 346 bp, Zea mays
  unsure at all n locations
  Clone ID: LIB3180-042-P2-M2-C1
tagacttccactggaattcgtcagatccttgggcgaattgtcagtgtctctgatgggggcnagagcactggtggaggtggaacactgcagatttggcgcatgagtgatttgatctaccgcccagaggatgaagttcttgcagagctggagaatttcaaggctcacttggccagctgtgcaccgaagaattgagtcatgtgggttacctgcggaatgcaatcctgtggaaactgagtaggtgatgtagttttctggccataagtatgagccccagttgacattgaatctgtcctctgatgctcctagagcttgtccctttagggttttgtgcttttgtgagcttgtg

SEQ ID NO: 29140 - DNA, 374 bp, Zea mays
  Clone ID: LIB3180-042-P2-M2-C10
gtcacagctgggttgatgtgactttcggggtgttcttagccaggagggttgccctgactagggccctcttctacatcatcatgcaatgcctgggtgccatctgtggagctggagtggtgaagggcttccagcagggactttacatgggcaacggtggtggcgccaatgttgtcgcacctggctacaccaagggtgatggccttggcgctgagattgttggcaccttcatcctagtctacaccgtcttctcagccaccgatgccaataggaatgccagggactcccatgttcctatccttgccccactgccaattggtatcgcggtgttcctggtccaccttgccaccatccccattactgtcactgtcatcaac

SEQ ID NO: 29141 - DNA, 237 bp, Zea mays
  Clone ID: LIB3180-042-P2-M2-C11
tcttcctaaatcacaacggccgcccttatttgtttggtttttaaaaaaagtatgtttgtttaaattaattttttttattatattattatttatttttttttttccaaaaaccaaaaaaaacaaattttattaaaaaacaaaatctttaaaaaaaaaattttcaaaaacaaaaatctcaatactttaaaacaaatttaccaacaaaatcttaaaactaaattattaaaacataatcca

SEQ ID NO: 29142 - DNA, 140 bp, Zea mays
  Clone ID: LIB3180-042-P2-M2-C12
tcttcctttctatcgggagacgcacagttccggcgggttcttatataaagcctgctcgacgaattaaactattcttaacgccatctagggcatgaactgcaaggagctgtactgcctcaacatcaccgtcaactaggccc

SEQ ID NO: 29143 - DNA, 433 bp, Zea mays
  Clone ID: LIB3180-042-P2-M2-C2
gctttctacactcagacttggataatgggcgtcgatccacaacccaattcggggagaaacttccatggtttcttgacgcacttccatcgagtgattgttctaaaggcggaaaaggagcttattcaacaagtttagacctcagtggttatgaaagtggcattatacaagcttcggcattccgaacataccatactccccttaacaagcagagtgactatgttaactcaatgagagctgcccgggacttcagttctaaaatgtccagagatttgcagatgaaaattttcccatattccgtgttctatatattttttgagcaataccttagcgtgtggaagacagctatcatgaacatatgtgtttgccttggtaccatttttgttgtttgcttcatagttaccagcagtttatgggcttcagcaataattttaac

SEQ ID NO: 29144 - DNA, 169 bp, Zea mays
  unsure at all n locations
  Clone ID: LIB3180-042-P2-M2-C3
acatcactagcctcacccattctggattgtttaaacaagaagatggggctggtcacttcttttgctctatgaancccaattactagctatcatatataaaattaaaaacttcattatatccagtgccacctccaaaatataacgtctcgatagaacaaaaccttattat

SEQ ID NO: 29145 - DNA, 123 bp, Zea mays
  Clone ID: LIB3180-042-P2-M2-C4
ccttcctttttggtttcgtaactgttaaggaactgagtgtgtctaattaaatggatggggggtgctattcaaaaatttccgaagggggccaatgccgaccgcggggaaggtgatcaagttcaa

SEQ ID NO: 29146 - DNA, 332 bp, Zea mays
  Clone ID: LIB3180-042-P2-M2-C6
tgttgtaacacacaacgtccggcaagatcggggagcagaaaccacgaggccggccaggatccggaacgcgcgcgcgatgtgtcccgtcagaggcggtggttgttcttggccagcgtccgtcgtcggctctgtcacggcggcgctgttcctcgccgccgtcatcgtgcggctcttcgtcccccgtgcctgttcttcaggaattatcaaggggcggcggcaggtaggtgctggtgctgccggaggagcacggttccttgccggttcgctcggttggccgctcctcggcgagacgctggcgttcatccgggcccggtacttgccttgcccggagt

SEQ ID NO: 29147 - DNA, 410 bp, Zea mays
  unsure at all n locations
  Clone ID: LIB3180-042-P2-M2-C7
tcacaacgttaacaaagcagctcacttcaggtcaattcagccatgaggggcgaggtcccatcantacccatgtttttgctcctcctggccttgggtgctgaggccgacctctgcttcacgcgtagcaggaccttcaaagggtggtgccaccagagcgagaactgcatcaccttgtgcaagagcgagggcaataccggcgggttttgcaagcttggggcttgcatgtgcaccaaagagtgtgtccgaagtactgacgctgctggtgctaataaagccccacagccgcattttgatttgattagtattaattgaagaattattgttttggtcttttccttttatctactttattttccttttttttcctttatcttctattctatttatattaatttttctctattcctttt

SEQ ID NO: 29148 - DNA, 211 bp, Zea mays
  Clone ID: LIB3180-042-P2-M2-C9
gcgagatcgggggtcgccagctcgcggggcgcggtgattaaggggggggcggggattcttatatcttacttaataagttcttattcttacaactgtcttaatcatggcccttctggccagtgtttctattggaggtttcatataattgtgaattaatttcctttttccagttggttgaacaattaactttatttagatttacgttatctaa

SEQ ID NO: 29149 - DNA, 346 bp, Zea mays
  Clone ID: LIB3180-042-P2-M2-D1
gggttagcgaagagattatttgatattgcctatggccgtcgtctagctggtgtcggtggtagctggttgggtgcgtggggactagagaagcttttgtgggatatgctcgtcttccgaaaggttcgtgcaatcttgggaggacggattcgctttattcttgcaggtggagcacctctgtcaggggaaacacagagatttatcaatatatgtcttggggctccaatatctcaaggatatggcttgactgaaacctgtgctggtgggacattttcagagtatgatgaaacatctgttggtcgtgttggtccccttttgtcttgttcatacattaagttgattagacttg

SEQ ID NO: 29150 - DNA, 454 bp, Zea mays
  Clone ID: LIB3180-042-P2-M2-D10
tcttcctaccaactagcaccatacaaagcacaatagggtaccaacaaaggcagggaaagtattttacctccttatcctccttgctcttttttcaagtgcttctactgctaccattttcccacaatcctcacaacctcctatacctttccttattcccccgtacctatcaccagcgtattcttctttatgttaaaacccaattcttcaaccctatatgatccaacaagcaatcccagttggcatcttacctttatcacccttgttcctccaacaatcattatccctattacaacatttaccatttgtgcatttatttgcacaaaacattatggcacaacaacttcaacaacttgtgctatcaaaccctttcttccttacttttactatcaacatttttttcaattcaaccaactagcttcattgaactcttctttttatttgcaacaacaacaac

SEQ ID NO: 29151 - DNA, 358 bp, Zea mays
  Clone ID: LIB3180-042-P2-M2-D11
tgacaaatggattgaccttctcaagcaaggggatgaaacttggaaggggggggatattgtgcacacactgacaaataggaggtggttagagaagtgtgtaacttatgctgaaagtcatgatcaagcattagtcggcgacaagactattgcgttttggttgatggacaaggatatgtatgatttcatggccctcgatagaccttcaactcctaccattgatcgtgggatagcattacataagatgattagacttatcacaatgggtttaggaggagagggctatcttaatttcatgggaaatgagtttggacatcctgaatggatagattttccaagaggtcctcaaagactttcaagt

SEQ ID NO: 29152 - DNA, 322 bp, Zea mays
  Clone ID: LIB3180-042-P2-M2-D12
ttgaactctcctgcttatttacaggagcagcaactactaccattcgggcaggtagctggtgtgagccctgctaccttcttgacacaaccacagttgttgccgttctaccagcacgttgcgcctaacgctggcacccttttacaactgcaacaattgctgccattcaaccaacttgctttgacaaacccagcagtgttctaccaacaacccatcattggtggtgccctcttttagatttcttatgagttatagttcaataataaagttttttatctgatgtttgtggcttcccagaaataagaaagtacatttctagattctt

SEQ ID NO: 29153 - DNA, 386 bp, Zea mays
  Clone ID: LIB3180-042-P2-M2-D2
ggaaaaaaaacgttgggggagactagttgttggataattagcttgtgagatgtgagataaatgtgcgtacgttgtcaacgaatagtttcagaagagtcagattggcttccacagttcacctcgctgcaacccaaaatctggtctccactgccggcatttgggggaatttctcggttgggtgaaggctgagttatttcctcgagtggtcaagttgttttacttccacagttcaccagtttcagcttttgtaattcatcggttcatattcttcaggcggcagccagtccgtgctgcgaacgactttccaaatacatgtaacataaatcttataaaaaatttattttgttacagaaaattacttttaaaaaaaataaaaaaaagggcgg

SEQ ID NO: 29154 - DNA, 258 bp, Zea mays
  Clone ID: LIB3180-042-P2-M2-D3
tgcagtttgtgcgcgccggcgccacggagaagtgagaggcgctggctgtgaagtgtgaaggaaggtgatgttgcagggtcccagatgtgacgactcgatgcgaaggagaaacgtttcgaaactggaagcaaaaaacggtcgaaagttggtgcctctacttggtttggtttatgctttgggtccaccagccataataatatactttgcttgaggattctaccataacaattattcatccttttattttttaccctatgt

SEQ ID NO: 29155 - DNA, 173 bp, Zea mays
  Clone ID: LIB3180-042-P2-M2-D4
tcgttaggcccagtaaattttttgatgcacgattggtagtattgccggtgccgctggtgctgggagctcatcatcattcgtcggtagcaggaaggaggcggcgtgtaaggggaggcaaatgctggaggcctcacctcagggtcttttcaccagatggacacgccggataggcc

SEQ ID NO: 29156 - DNA, 406 bp, Zea mays
  Clone ID: LIB3180-042-P2-M2-D5
ttcgaagtacccgttaccgccgccgcctgtggggtagccgccggagaagctgcgcgcgctcaggaggacagccatggcgccggagccggaggatgatattatgaacgagaagaatccccgcccgctcgacgaggatgacatctcgctcctcaaaacctatggactggggccgtattcgaccagcattaagaaggtcgagaaggagatcaaggaaatggccaagaaaatcaacgacctctgtgggataaaggagtctgatacagggctggctccacctagccagtggggatatggtttcaaataatcagatgatgcatgaagaacaaccgttacaagtagcatgatgtacaaagattataagccctaatacggttgatgccaaatatgttataaatgtataacaaat

SEQ ID NO: 29157 - DNA, 337 bp, Zea mays
  Clone ID: LIB3180-042-P2-M2-D7
tcgtcagccccgcatctggcccggattaggggcctccggctccgtcggggagcgccccaccaacagccagcctctccagctgatctaagccaggcgcaactgtgaaacaatggcgacatccaagaaggatccccccaatcctagcagaggcaggacgtcacccaacctcatgtcgtccagcagtgagtcctctgtgcacggatatggtgctaggcgggctcggtctgtaccgagttccgcgcaccgcaaatttggctcatcttccccgtctgtgtctgcctcaggctccacatacttacatcattcatcatttttcaacgcttgtatgatcattttc

SEQ ID NO: 29158 - DNA, 357 bp, Zea mays
  Clone ID: LIB3180-042-P2-M2-D8
cccaattcctccttcggatctcgcattcagcgcagcgcaggtgtgagggaggggggacccggaggaagatggggctcgcgttcgggaagctcttcagccggctcttcgccaagaaggagatgcggatcctcatggtcggcctcgacgccgccggtaaaaccaccatcctctacaagctcaagctcggcgagatcgtcaccaccatccccaccatcggtttcaatgttgaaactgttgagtacaagaacattagcttcactgtctgggatgtcgggggtcaggacaagatcaaacctttttggaggcattacttccagaacacccagggtcttatttttgttgtggacagcaatgacc

SEQ ID NO: 29159 - DNA, 329 bp, Zea mays
  Clone ID: LIB3180-042-P2-M2-D9
gcagaggcttggacggacgggatggacagggcgcggtacgagtcaggctgcgggcactggatcgccgggcaggaggcaggcctcgccgagctcgaggcggcgtcggccaatgccgccgcgggccgggcaacggacgccgagctgcggaccgtggtggagcggtgcatgctcgggtaccaggactacgccacccgcaggcgcgcgctgtcacgggaggacggcgtttccttcttcgccccgccctggtgcaccgtcttctagaactccatgctctggctcgggggctgtcatccttcgttcacggtacgtcttctcttcaacccttttcc

SEQ ID NO: 29160 - DNA, 447 bp, Zea mays
  unsure at all n locations
  Clone ID: LIB3180-042-P2-M2-E1
tcccacccgtccggttttagatcgcgagcggccggcctttttttttttgtgggttgggttaatatatnnnntnttnaaaaatgtcaatcaatatattgattatttttaggaaacacatgccggtatgagggcaccattatcgattacatctcatatgtaatcaaaaaaatggcaccttcaacaatgggttgtttccacaacaaggcaggtttcattaaaaataactgtctgttatttaacaatttttctttctttaaaaaggaattttccaattttttagacacttttattttataaaataactgttttttcattttttattaaccatttataatttttatactattaaatttttttaattataaataatttttatatatttatatatattttatttttttaaatttttttattttatttttattctaatttttataaatttatttt

SEQ ID NO: 29161 - DNA, 270 bp, Zea mays
  Clone ID: LIB3180-042-P2-M2-E10
tttgcgggagcccgttctgctccagggaaggttcagctccagctgcaggggcgggtgaacaatgggacgaactactcaactcctccacctgcgcgaacaacatcctggcgaccggcgccgctgcgctgctcgccgtcgtcctcgcgctgcagctgctcgtcagggtcgcaaggaacggactacgacacgcgcccgtcttcgcgctcagctcgcctttgcagcgggccgtcgtggttgtcaactcctgcctgggcctgtcctacctgtgcc

SEQ ID NO: 29162 - DNA, 262 bp, Zea mays
  Clone ID: LIB3180-042-P2-M2-E11
taattttcctcggcggcgtctccatgtcaccggcggctgacctgcggggggggaccgaaggcaatggctagctcttctgtgtcgtcatacatggagctgaaccgccccaacctggaggacttccttccgtccgacttgttcccgcaggaggctcccaggaatctccatctgcgcgatctgtttgacatttttcctgtgctaacctaagcattgtttgccatatactatgatttatttactcgctgttttaattctaattttt

SEQ ID NO: 29163 - DNA, 271 bp, Zea mays
  Clone ID: LIB3180-042-P2-M2-E2
tacatggctttggcgtctaaagcctcccctgcgggatggaatgccaccgccggcggggagccaattccaaagcgtgacaaagccgttgcaaatgattcaacatacctcaatcctcaagctcatgatagtgttcttggaatcattctgggaggtggtgctgggactagattgtaccccttgacaaagaagcgtgccaagcctgcattgccattgggtgccaactatagactgaatgatatttcctgtcagcatttgtttcaacagcaacatt

SEQ ID NO: 29164 - DNA, 163 bp, Zea mays
  unsure at all n locations
  Clone ID: LIB3180-042-P2-M2-E3
tccgacttcttccgcgacgcggccaggagggtgggcgactagggagagctcgtctgtgtctcacgtnaggaggcggtgcacaacatcctcttcgccatgtgcttcaactccttcggcggcatgaagatcctgttcccgtcgttcgtcaagtggctgggccgcg

SEQ ID NO: 29165 - DNA, 137 bp, Zea mays
  Clone ID: LIB3180-042-P2-M2-E4
ccttcctttcttaaatcccaacctcccacccttcttttctgtttttaaaaaaaagcccgcccgcttcccctccaaatccaacatctttaaccatattccataccaaaccacattaactcttttccactccttttttt

SEQ ID NO: 29166 - DNA, 332 bp, Zea mays
  Clone ID: LIB3180-042-P2-M2-E5
tatcgtgtaggagccaggagcacactcccaaggcggcggccatcccaccgcctgtcgggtcggcttcactcaaacggcttctgcagcatcctataaaacctcctcaccaacctccgatggcggaaattcttgccctcccacaccgaccccctcccccacggcccgccttcccccgggagcacgagaccctcgttccctgcgccaccgactgagccaaggccgcgccttgccgtttccgacctaggtcgcgagatctcggaggagcggagcccctccgtgccgccacctgctacaggggggcacgcaaggaccgcacggcgcgatggtggaca

SEQ ID NO: 29167 - DNA, 197 bp, Zea mays
  Clone ID: LIB3180-042-P2-M2-E6
ccactcacacaccgtgcagttagctgtcacgggatcgagcaagaaggaagaagatgagcggcaccgataatcgatcgacgacacgcgcgcgatcgaggtgaggagcgaaagaaaaggtggccttttcgaagccgccggacggagtgtagcgctagctagctccccaggccggagaggaggatggtgggacgaggagc

SEQ ID NO: 29168 - DNA, 409 bp, Zea mays
  Clone ID: LIB3180-042-P2-M2-E8
caacagctgagggactggtaaaagagaaagggctgtttgatgctggggttggtcttgaggtgattgagcatgtcgccaatcctttggagttctgtgaatccctctcggctttgacaattcctaatggtgccactgtgatttccacaatcaaccgatcaatgcgagcatatgccactgcaatagttgctgctgaatatatcctcagatggcttcctagaggcacacatgagtggtccaaactggttaccccggaggagcttgtcctaatgctgcaaaaggcttccgtctccgtcgaagagatggcagggttcgtttacaatccgttgagcggagaatggtccctgtcagatgatatcagtgtgaactacattgcttttggcgtcaagaagggcgaagctttattgacaaa

SEQ ID NO: 29169 - DNA, 397 bp, Zea mays
  Clone ID: LIB3180-042-P2-M2-E9
gcttacaggaaaatcaggctccgtgctggggatgtgcaaggcaggaggggggtcacaaacttctggggcatgaattttaccaccgataagctcagatctctagtaaagaagtggcagacattgattgaagcccatgttgatgtcaagacaaccgacaactacatgctgcgtttgttctgcattggttttaccaagaggcgcccaaaccaggtcaagagaacctgctatgctcaggcatcccagattcggcagattcgccgcaagatggttgagattatgatcaaccaggcttttacatgtgaccttaaagaacttgtttctaagttcattccggaagttattggcaaagagattgagaagtctacctccagcattttcccacttcaaaacgttttta

SEQ ID NO: 29170 - DNA, 435 bp, Zea mays
  Clone ID: LIB3180-042-P2-M2-F1
acgcttttcttctccctccattcattcacacaccgcacctcccgaactccgagctagaagtttcgcttctcgtcgcgacgactgggcgagaccgccgccgccgcctgagttctttagaaatggctgatggtgaggacatccagcctcttgtctgcgacaatggcactggaatggtcaaggctggttttgctggcgacgatgcaccaagggctgttttccctagtattgttggccgtcctcgccacactggtgttatggtagggatgggacagaaggatgcgtatgttggcgacgaggcacagtccaagagaggtattctcacgctcaagtatccgatcgagcatggtattgtgagcaactgggatgacatggagaaaatttggcatcacactttttacaacgagcttctggtgccccaaaggagcaccctgtgtt

SEQ ID NO: 29171 - DNA, 181 bp, Zea mays
  Clone ID: LIB3180-042-P2-M2-F10
tcttccttttttacctgaagaagagaatggcctccacggtttctccaccggtggtggggaggtttaccaatatcctatccattgcctagtccggccgttttaaaacatttttattttaccactttggcgttctttataactttaataatcattacctcttctccattatttcattttataa

SEQ ID NO: 29172 - DNA, 366 bp, Zea mays
  Clone ID: LIB3180-042-P2-M2-F11
gctggccgtcacgcagctggcgtacgtgctgatgctgcaccgggcgggcggggccgcgtacgctgatgatgaagccgatgctaccgcctacgccgacgctggtggcgaccagtgcgagcctggctgttccatcggcaccgaggacgacgccgacgccgactgccagcgcgcgcagcagcagcagcatggccgccaccaccaccaacccaggcagggcggcgggccctcgtgcagtgtcatgtgaactagcatacccatgcatgcatgtttggtggtgtcgctctcttgtcttgccattttccgagctcgtgtttcgtctcgtggaaaataagcaatttaaacttagtttaatttcctgtatgtcat

SEQ ID NO: 29173 - DNA, 340 bp, Zea mays
  Clone ID: LIB3180-042-P2-M2-F12
caagcagcaacagcctgcagccggggggcctcgcctccgcctggtggaccgtgaccgtcaacagaggaagacgaggatgtcgggatccaaggtgtacaccctcgaggaggtggctaagcacaacaccaaggacgactgctggctcgtcatcggcggcaaggtgtacaatgtgaccaagtttctggaggatcaccctggaggcgatgatgttctgctgtctttcactgccaaggatgctaccgatgatttcgaagatgtggggcacaataacactgcccgggcaatgatggactagaacttattggttgagattgatgcaatcccgatacccaccaaggtg

SEQ ID NO: 29174 - DNA, 307 bp, Zea mays
  Clone ID: LIB3180-042-P2-M2-F2
accgtgccttttcttacctcggggtgctcgagttggatgttcggggacgcacgggggcatgcccgcggcggccgcggccaggaaggcggtcatggttcctgagggcgagaatgatggcctcgcatcaagggctgactcggctcaattccagtcggatgaactggaggtaccagacatttttgaagagacaacgtgcgctgcttgtttaggttaatgcttaagctttttaaaggagttctgagtggtcttctttacttattttattttacaaatatatttttcctgttttgtctctcgttttttttat

SEQ ID NO: 29175 - DNA, 425 bp, Zea mays
  Clone ID: LIB3180-042-P2-M2-F3
gtctcttcctacctgaagaaggttggatacaaccctgacaagatccacttgggtcccatctctggtttcgaaggtgacaacatgattgagaggtccaccaaccttgactggtacaagggcccaaccctacttgaggctttggacttgatcaatgagccgaagaggccttcagacaagcccctgcgtctccccctacaggatgtgtacaagattggtggtattggaactgttcctgttgggcgtgttgagactggtatcatcaagcctggtatgttgttacctttggtcctagtggccttactactgaggtgaagtctgttgaaatgcaccatgaggctctccaggaggcccttcctggtgacaatgttggcttcaatgttaagaatggttctttgaaggatctgaaacgtgggtttgtggcctcc

SEQ ID NO: 29176 - DNA, 354 bp, Zea mays
  Clone ID: LIB3180-042-P2-M2-F4
ggatttatggggggcaagctcctgactccagttaaagaagtgcttgacacattcttggcatgaagaatcgatgataatctatgctgtagaaaccctaataggaggagctactcagggttccaaaccctgcaggctaatcttgcaggaaatttctgggtcggcgccgggctgaataaacatcttgatgctgatgaagcaattgttcttggagcttcacttcatgctgctaacctgagtgacgggattaagttgaaccgtaagttgggaatgattgatggctccactaatgctttggtacttgagatagatggtccgggttatctcaaggatgaaagctttgttcaaattttgttc

SEQ ID NO: 29177 - DNA, 318 bp, Zea mays
  Clone ID: LIB3180-042-P2-M2-F5
ttgatatcttgcatgatgagaaggttatagatctgataattggcacaggaagcaaggtggcttatgcccttgcaaagcaatggtttggaatatacacaagtgcagaggagcccaatgacgaatggctgttggatggtttggctggttttctaaccgatttatttatcaagcgttaccttgggaataatgaggcacgttataggcgtttcaaggctaaccacacagtatgtgagtctgatgttagtggtgcaactgttttgagctctactgctgttttaagagatttatattcaactcaaacaatcggtttatatggta

SEQ ID NO: 29178 - DNA, 142 bp, Zea mays
  Clone ID: LIB3180-042-P2-M2-F6
tcggactcgtgggttccggacgaaatctgacccgggccacactccgctgctcgtccagggcaatccactccaaggcctggatctcgctgctgctcgcgctgaccgtcgctctctccgcccgggcggaggaggagcccgcctc

SEQ ID NO: 29179 - DNA, 384 bp, Zea mays
  Clone ID: LIB3180-042-P2-M2-G10
gcagtcggctgccgcaaactggtggtagggggcgcgccgtcaccgtgtccgcagatcagcggcgagcagataccacaccactctactgacgcccgacgagcagtgtaacattttccttcagccatgggtaaggagaagactcacatcaacattgtggtcattggccatgtcgactctggcaagtcgaccaccactggccacctgatctacaagcttggaggtattgacaagcgagtgattgagaggttcgagaaagaggctgccgagatgaacaagcggtcattcaagtatgcgtgggtgcttgacaagctcaaggctgagcgtgagagaggtattacaattgatattgccctgtggaagttcgagaccaccaagtactactgc

SEQ ID NO: 29180 - DNA, 294 bp, Zea mays
  unsure at all n locations
  Clone ID: LIB3180-042-P2-M2-G11
ccttcctttctagatctacttcctacaccgagtcgcgactccatataaagagcgtggggatatcacaatttaccanatccctatcttctttaccaccaacattccatcactataactcttaacttaaacctttatatctccttaaacttacatcaacattatatttatccctaattcttactatttcttataatctaccacttcttacttcatcttacaactctttatattttatctttctttattattaatatttcttatttaaattttctattttattttacatactttttt

SEQ ID NO: 29181 - DNA, 416 bp, Zea mays
  Clone ID: LIB3180-042-P2-M2-G2
tccaacaccacctcgcctgcaatctccgtagcctgcgtcccgtcgagcatcggtcgggtctgcctactgcggaaagtacaaggatgagctcatcaagaatgctgcctacattggcacccctggcaagggtatccttgctgctgatgagtccactggcaccattggcaagcgcctttccagcatcaatgtcgagaacgttgaggagaaccgccgtgccctccgtgagctcctattctgctgccctggtgctctccagtacatcagcggtgtgatcctcttcgaggagaccctgtaccagaagaccaaggatggcaagccttttgttgatgtcctcaaggagggaggcgtcctccctggcattaaggttgacaagggcaccattgaggttgtggcactgataaggagaccaccaccca

SEQ ID NO: 29182 - DNA, 223 bp, Zea mays
  Clone ID: LIB3180-042-P2-M2-G5
tccaaactgcaaaggctgctcttgagttgggttctgcttatgcatcaggcgagtcaaggtttgctcgtctattgaaggaatgtgatgagcgcatcgctgaggaatctagccaggcaccagtaaagaatgttgaggctactgtggctgctactattgaggacaaggaggatttcacaaatatggagattaccccaccagttattgaacccccaagccaaccaaa

SEQ ID NO: 29183 - DNA, 294 bp, Zea mays
  unsure at all n locations
  Clone ID: LIB3180-042-P2-M2-G7
tcagtaaacaagctgaaccagatggctaagggtattgtggggatcatgggggttgctctctgncttcttatcctgggaatagcaacagcaaatttctttgtcttcctcacttcacagattctcctggcagttttcgtgtttgggaatacgttgaagacgctcttcgaggcaattgtcttcttgttcgtgatgcatccctttgatgtcggtgaccgctgcgaaattgaaggtgttcagttggttgttgaggaaatgaacttcatgacaactgtgtttctccgatctgataacctt

SEQ ID NO: 29184 - DNA, 291 bp, Zea mays
  Clone ID: LIB3180-042-P2-M2-G8
tcttcctcccacccttcccctccaaatccagcggcggtggcaaagccaagccaaacgatcttactgctccgctccgctttgttgccaatttccgctccaagcgtcgcggtcgtgaagtctcgttgcgatggattctaggcccctctagactgactcccccggcgacccggccaacggcgccgtccttccgttgtccgtgttcttatctttccttactcgtttctttaatatcattattcccttcatctccaatctttatttatctttttctttatctctggtattttgttt

SEQ ID NO: 29185 - DNA, 359 bp, Zea mays
  Clone ID: LIB3180-042-P2-M2-G9
gcgacgtcgtaccagttcgcggtgctctgggtggccttcgcgttcgggggggtgggctcggcggggatccgcccctgcagcatgcccttcggcgccgaccagttcgaccccaacacggagtctggcaagcgcggcatcaacagcttcttcaactggtactacttcaccttcacggccgccatgatgatctccgccaccgtcatcatctacgtgcagagcaacgtgagctggcccatcgggctgggcatccccacggcactcatgttcctggcatgcgtgctcttcttcatgggcacgcgcctatacttgcgggtgacgcccgaggggagcccctttaccagcgtcgtgcaggtgctatc

SEQ ID NO: 29186 - DNA, 173 bp, Zea mays
  unsure at all n locations
  Clone ID: LIB3180-042-P2-M2-H1
ccaacccttcctttttcccttggcttattttaaaaccccaaccgggcgcctttttttttttgggttgggatccaattcccaaacaacatctttaaatttcttccaacccttttttgntccacaccaaaccaaatagaaacctcacaggccaaaacttccccaaaacctacata

SEQ ID NO: 29187 - DNA, 273 bp, Zea mays
  unsure at all n locations
  Clone ID: LIB3180-042-P2-M2-H10
tgacgtggtcactccaggggagctggtggggaactcattaaccgtcncggccnnacgtggcgcctaccccgacggtcgctctgtgcgcgcgtcggtcaccgggcgccgccgcatcgtgccgcccgcacctggctccttctaccagagatccacggtggaggtggtggggtacaaggcctatggttgcttttccgtatccttatatcttctttttctcccaagtttcataggtaatgtctagattagccttttctcttttcatttttttttcct

SEQ ID NO: 29188 - DNA, 390 bp, Zea mays
  Clone ID: LIB3180-042-P2-M2-H11
ttcaaaatacttagcacaccagcgatggcgggtacctaccaaactggggtgggggccgagccacaattgctgaacactgaaattatcactcggagggccaccaactctgttgctgacactaacagaaaagacaaatgcgtcggctacttggatgtgtttgtacaccaggcacgcgacatccacaatgtttgtatctatcacaagcaggatgtgtatgcaaagctgagcctcacgagcagccctgatgtttcgtgctcaaccaaggtgatcaacattgctgggcgcaacccaatattttaggaaagcctacgccttgatgtacaaactgtggatgcttctctcaagtgcgagatatggattttaagcaaagtgaggaactacctgtaggat

SEQ ID NO: 29189 - DNA, 370 bp, Zea mays
  Clone ID: LIB3180-042-P2-M2-H12
tgaagatcctaagaggcatgctaaatctaaggaccctgggtggaagtgtgggggctggccatatgaagggaagaaggatatggttcaatgcatattttgcaaaaaggtggttcctgcaggaatcaagagattcaagcaacacatcgcaggtggttatgcagtcgtcgagaggtgtccagctgcacctgcaatgatcaggaaagaaatgtttgattttttggtgaaaaatgcaagaaaagaactgaacttgcagcaaggaagggaatgggattctgaaagtggaggtggagtgcaagaagtacctgttgtgccaagttcagggacaagagttaaggaaaataaaaggaaggttcaagcatccattggttct

SEQ ID NO: 29190 - DNA, 433 bp, Zea mays
  Clone ID: LIB3180-042-P2-M2-H5
tccgttacccggcggcttaaaccctaattcccattgcatcttcatttccggtcgccgcgcgtcaataaaattcttttttctccaggtcaaacctggatccactttcaaatgttaaccttgacatggctttattccttcacttttcccatgctgccctttgggaatcaaaaaaaaattacagttccttaatttttgtcaaaattgattacaaaaaacttgccattttaaccctctttatcgacaaatacccacagatacaattccatttggttttcaataaagagttttagctgtcacacacatctaaaactaccactgtttttttctctgtttacaaggttcagcatccaatttatgtaaataaaattgatttttattcttatgattaataatattaacttaacactttcataattaaagaatattctttttt

SEQ ID NO: 29191 - DNA, 357 bp, Zea mays
  unsure at all n locations
  Clone ID: LIB3180-042-P2-M2-H6
gactactatagggaagctcgctcgcctcaggtaccgatccccaattcccacccacgcttcctcgatttcaatatgagagggaaattaatagagagagagagatagtttaatttgtggcgcgcagcacacatataattctgtantttcatctactactggcctcacataaaaaaccctagctagctctagtagctagctcatactcttgcaattcatatccatgctgcactcgccagaccaccagtcaagctagcttatttccgccttttaccacgttgattaattattcgtcataataataaccttgtccatctagtttcaattctttttttttattattataccatttcttctttc

SEQ ID NO: 29192 - DNA, 421 bp, Zea mays
  Clone ID: LIB3180-042-P2-M2-H7
ttgaagggcgacaaccagcccaagacttcgggtggttacaaccgggggattgccgtcttcatcctggacgcgctcaccagacggccgtggtttcgggaggaagatttggctaaagcattgaagctccactcgaaacagttgtttcgcattctccgtttttttgaagaggataaactagtcacgagggatcatttaaaggtgtcagtaaaaaacgcaaaatcacataatgctgcatctgctaatgatggtcaaccaattgctattgatggataagtgaaagtaaagttgtacacacattcatactgtttcttggattatgctcatatcttagttgttttattgtacctttttcacctttttatgttatatttttatgtatatttggtatttttatatttattttactctattttttttcttt

SEQ ID NO: 29193 - DNA, 321 bp, Zea mays
  Clone ID: LIB3180-042-P2-M2-H8
ttttgataatgatcgtgttcgtgcgcacgcaaataaaactctacgggggatggttgaaaattataatttggatgttagttttaccccaaaccaaaatcttattttatgtgccatttatcaatcatggatagaacccataactacagcttttgcacaaactatcctgcttaaacctaatgatttccacccttttaatttaactgccatggcatgccctgccttgccactgtaccctttgtcacaaacataatctgaactgtggatcttacccattcttaaacaaattatatcattcttcaataaggttggtttcaatctttc

SEQ ID NO: 29194 - DNA, 441 bp, Zea mays
  unsure at all n locations
  Clone ID: LIB3180-042-P2-M2-H9
tcccactcgtccgcgggtccccagggaggcgtgctcatcttaagctggggtgccatccacaccaaccccnangagcaccccatcaagttctctcaggcattccatttgctgccggcagctgggtccttcttcgtgcataattacatgttccgcctgaactatggctaaaagacagccgaaaactcttgtgatgaacgaatttgttaagggcttcatgtttagacgatgaataccgactgtcgccgctactctcatctcctttgtatctcctctgttggctgattaactgttattacaagaaattgctggacttgttttttccagttgttttgaatcatgtattattgttgcattggcaccattttttcttgtattttatattaaacaatccaaatcttgtntttacatatattctattaattatttttttttccatttttt

SEQ ID NO: 29195 - DNA, 330 bp, Zea mays
  unsure at all n locations
  Clone ID: LIB3180-043-P2-M2-A1
cagatgtgacgtgccaacattatatttagggatcggactacttattactagctgatgtagtgattgttgtggaagaagattgcacagncaatctctgtttcttacttggtcctgtgtcaaatttagtgtaagaactggcgtccttgacagctggtatatgtaaaatagtatggccaccactattactatatataacaagagacttcacattttaaaaaaaaaatatattaatttttttttttttttattatataataaaaataaaaaaagaaaaatatttatattaataaaaattttctaaatcatttatacaaatttaaaatattatat

SEQ ID NO: 29196 - DNA, 355 bp, Zea mays
  Clone ID: LIB3180-043-P2-M2-A10
ttgtttgcctactctgctgccgcggaggaattcaaggacaaggaaatcaagttccttattggtgacatcgaagccagccagggtgccttccagtactttggcctgaaagaggaccagacaccccttatcctcatccaggatggtgactccaagaagttcttgaaggttcacgttgaggctgaccagatcgtctcttggttgaaggagtactttgacggcaaattgactccgttcaggaagtctgagcctattcctgaggtcaacaatgagcctgttaaaggtgttgttgctgacaacgtccacgacttcgtcttcaaatctggcaaaaatgttcttattgaattctatgccccct

SEQ ID NO: 29197 - DNA, 415 bp, Zea mays
  unsure at all n locations
  Clone ID: LIB3180-043-P2-M2-A2
tcggatcncatctacagcgacgtcgagaactccgagcacaagttcgtgctgaaggacaagaagaagccgatcatcttctcgatggcgcgtctcgaccgcgtgaagaacatgacaggcctggtggagatgtacggcaagaacgcgcgccttgagggagctggcgaacctcgtgatcgtcgccggtgaccacggcaaggagtccaaggacagggaggagcaggcggagttcaagaagatgtacagcctcatcgacgagtacaagttgaagggccatatccggtggatctcggcgcagatgaaccgtgtccgcaacggggagctgtaccgctacatttgtgataccaagggcgcattcgtgcagcctgcgttctacgaagcgttcggcctgactgtgatcgagtccatgacgtgcggt

SEQ ID NO: 29198 - DNA, 309 bp, Zea mays
  Clone ID: LIB3180-043-P2-M2-A4
tttaaaggtgctggcgtcttggaaacgaaccgacctgatgctaggaacgccttgtaccaggcaaccatcaagcacggagactttttgctgaaccgcatccagaggctgtcacgagttatcgacctgtacgggagagcccttcatgcaggagcttgccttggttcctggagtgtacgggcggagcttgactttcaatgggtctcagttgaagaagcttttagggatatttgtgttctgagaaattgagatctgcacttgttagcctaactacatgaagccccaaaaaaaaatcatggcgatgcttgtaga

SEQ ID NO: 29199 - DNA, 240 bp, Zea mays
  Clone ID: LIB3180-043-P2-M2-A5
aatggtcttgggttaccctgacaccggagggcgggttgtctacatcttggagggagtgcgcactatggagaacgaaatgctgctgaggatcaagcagtgtggtcttgacatcacgccgaagatccttattgtcaccaggttgctccctgatgcaactggcaccacctgtggccagcgccttgagaaggtccttggcaccgagcactgccatatccttcgcgtgccattcagaacagaaaa

SEQ ID NO: 29200 - DNA, 226 bp, Zea mays
  Clone ID: LIB3180-043-P2-M2-A6
aatgatatccagcacgatcccatacgactgcggcccatattaccacgccccggatggagctgaatcttccaacccacgcggcggtgatgccctaccacaggcatgtgggcacggttcgggagcaacatatccaagcgacgacgggcaacttgcgctccgatcttaacgtccttctcctccatccccaggccattagcgacgactcccgccttcgttccataaggtc

SEQ ID NO: 29201 - DNA, 450 bp, Zea mays
  Clone ID: LIB3180-043-P2-M2-A8
taataatttagaccaactagcaacatagaaagcgagcaatattttaccaacaatgggggccaaaatattttgcctccttatgctccttggtatttctgcaagtgctgctacggcgaccattttcccgcaatgctcacaagctcctatagctttccttctacccccgtacctttcaccagtggtgtcttcggtatgtgaaaacccaattcttcaaccctacaggatccaacaggcaatcgcagctggcatcttacctttatcacccttgttcctccaacaatcatcagccctattacagcagttacctttggtgcatttattggcacaaaacatcagggcacaacaactacaacaactggtgctagcaaaccttgctgcctactttcagcaacagcagttttttccattcaaccaactagctgcattgaactctgcttcttatttgcaaca

SEQ ID NO: 29202 - DNA, 434 bp, Zea mays
  Clone ID: LIB3180-043-P2-M2-A9
ttctgttgaccatgatgacccaccacagaagatgggaaatccttcagtggaggggactgaggaaaaccgtgatgcttcccaagaagcaaaaggcaaggctatggaagcaatttctgaaggaaaacttgaagatgctattgaacaccttaccaacgcaatagtgctgaatccactctcagcaatcatgtatggtactagagcatctgggtttataaaaatgaagaaaccagctgctgccattcgtgatgccaatgctgctctagagatcaacccagactctgcaaaaggctataaaactcgtggaatggcatatgccatgcttggcaaatgggaggaagctgctcatgatctgcacacagcatctaacatggagttcgactaggagatcaatgctgtgctcaagaaggtggagcctaaagctcacaagattgtgg

SEQ ID NO: 29203 - DNA, 102 bp, Zea mays
  Clone ID: LIB3180-043-P2-M2-B1
atacatatctgcgaacacggacgccctcgggcggccattagaagagagagagccgcgcaacaagcgtgacacaaggggaaacggggaagggagcgcaaggga

SEQ ID NO: 29204 - DNA, 253 bp, Zea mays
  Clone ID: LIB3180-043-P2-M2-B10
actcgctcgctcactagcaaaatgcaggcctgttccctccggcgagccctccttctgcggggaaccgcgaggcgcccagctcttccccattcccgtaggcaacaagccccgtgccttctcctccgcgtcccccgcggcagcgcgctctcccaaagacgctcataatgcgccgccgccgattatgccgacgctgccgtggggtgatgcgctcgcagtcacgcaacgcaccttctgcctgccgctcgctgggcgc

SEQ ID NO: 29205 - DNA, 324 bp, Zea mays
  unsure at all n locations
  Clone ID: LIB3180-043-P2-M2-B11
tcttactgctatttgtgcgatgcgaccattccggtgcctcgcagcaccgatccgggcgtccacctgttaataaatcgcctgagtttagtcgaaacacaatcgttaaaatgcagtaaagtaattcacgacccccgggcgcccccgtctccgatcctttattaatatcgccgcggcctcgcacctccatntgttctatattgncccattgctcgctcgccaagagttcttcttggtaggcaaggcaaaagcagaagcaaaaatgaaaggtcttgttgccgatggggagctcacggttctcgtggacgctaccggccaacccaaagc

SEQ ID NO: 29206 - DNA, 441 bp, Zea mays
  unsure at all n locations
  Clone ID: LIB3180-043-P2-M2-B3
acgtcgggccacactccgctgctccgccatggcgagccgctccaaggcctggatctcgctgctgctcgcgctgaccgtcgctctctccgcccgggcggaggaggagcccgccgccgcggcggaaggcgaggccgtgctcaccctcgacgtcgaacagcttcgacgaggcctgcgccaagcaccccttcatggtcgtcgagttctacgccccctggtgtgggcactgcaagaaacttgctccagagtatgagaatgcggccaaggcacttagcaagcatgacccaccgattgttctcgctaaggtngatgctaacgaggagaagaacaggccgcttgctaccaagtacgagatccaagggttcccaaccatcaagatcttcaaggaccaggggaagaaccattcaggaatcaagggccctaaggaggctgatggcattgtgg

SEQ ID NO: 29207 - DNA, 414 bp, Zea mays
  Clone ID: LIB3180-043-P2-M2-B4
tcgatcgtagtatgaagagtttctgaaaactggggacccgtagttcagttggaaggcaccgaaggatgaatggcagagcatcgccctaggctacacttctgggactacttccagcccaaagggcgtcgtgttgcatcaccgcggtgcttatctcatggcactcagcgttgccatcgtgtgggggatgcctgaaggggctgtctacctgtggactctgcccatgttccattgcaatggttggtgctacacttgggcgctggcagcgttctgcggaacaagcatatgtcttcgccaggtgagcacaaaagctatatacgaaggcatcacgaagcaaggagtgacgcacttctgtgccgcacctgttcgccttaacaacctgatcaacgcttcggcaagcgagaccttcctgccgct

SEQ ID NO: 29208 - DNA, 223 bp, Zea mays
  Clone ID: LIB3180-043-P2-M2-B5
tttttatgatttgctgctgcaacaagatggatgcaaccacttcgaaatactgcaaggcacgttatgatgagattgtgaaagaagtctcattctacctcaagaaagttgggtacaaccctgataagaatggcttcggtcccatttttgggtttgagggcgacaaccttattgagaggtccaccaacctttactggtacaaaaggccaacccttgttgggggttt

SEQ ID NO: 29209 - DNA, 218 bp, Zea mays
  Clone ID: LIB3180-043-P2-M2-B6
gctggcgaactccatttcgatcccatttgaaggcaacccatcctcggttccttcggctagcagcctctcacccttatggccaagatcaagatcgggatcaatgggttcggcaggatcggaaggctggtggccagggtggccctgcaaagcgacgacctcgagctcgtctccctgaaccaccccttcatcagcacccgttacatgacctacatgttcaa

SEQ ID NO: 29210 - DNA, 446 bp, Zea mays
  unsure at all n locations
  Clone ID: LIB3180-043-P2-M2-B7
tttnatggtccaactagaaacatagcaagcgcactggtgtaccaacaatggcaggcgagatatttagtcttcttatgcttcctggtctttctgcaagtgctgctactgagaccatttttccgaaatgctcgcatgcttctatagcttccctatttcccccgtacctttaaccagcggagtcattgtgttgtgaaaacccaattcttcaaccctacaggatccaacaggcaatcacagctggcatcttacctttatcacccttgttccttcaacaattattagtctctattacatcaggtacctttgttgcatttattggcacaaaacattagggcacaactaactacatcaacttgtgcttgcaaaccttacttcctactctcattaacatgtgtttcttccatttaaccaacttgctgaattgaacttttgtttttatttgcaat

SEQ ID NO: 29211 - DNA, 333 bp, Zea mays
  Clone ID: LIB3180-043-P2-M2-B8
attatgtcacgccctcgcgcaccagggcggcctgaccagaccggccgtgggaccgactcaacccagccgtccagacgcgccgtcgaccgtccttccaccaccacgcccgcgcctgtgcacgctccctagggttccgcagggccggggatcgccggagatggactggagcgcggtgacggcggaggacttggtggacgcgctgcgggaggtggactggtccatgcctccgcggcctgtcccggagttctatttctgctttaccgtcccacgcttctacttcaagtggaccatcctgcttaagtgcaatcttttacttcttcaggacaaactatt

SEQ ID NO: 29212 - DNA, 401 bp, Zea mays
  Clone ID: LIB3180-043-P2-M2-B9
ggttggaactaaaacgcattaatcaacatgagaatgtaagagcaaattgctgggaaggcagctaaatttcaacctaatgttataatgcaagggcattcaccttcagattatgttctgaatgtagtttcaagcatccgtccaaatgatctggagcaggccctcttggcattgccgttctcggatgcactaaagctcatgtcttacttgaaggagtgggctttggttccttcaaaggttgagcttgtttgtagggtttgcttagtgctccttcagacacatcacaatcaattaactgtcacgccagctgcaagatccttgttgacagaactgaatgatattctttactgtagagtaaaggaatgcaaggatactataggcttcaacctcgccgcaatggatca

SEQ ID NO: 29213 - DNA, 446 bp, Zea mays
  Clone ID: LIB3180-043-P2-M2-C1
tttgttttccgccgccgcccaaggacggaaggagaagagggtacggccgtcttcttgcccccatggcccacgagaagaagctgtccaacccgatgcgggagatcaaggtgcagaagctcgtcctcaatatcttcgtcggggagagcggcgaccgtgttacccgcgccgcaaaggtgctcgagcagcttaacggccagacccccgtctttttcaaggcgaggtacacggtgcggtcgttcggcattcggcgtaacgagaagatcgcctgctacgtcacggtgaggggcgagaaggccatgcagctgcttgagagcggcctcaaggtcaaggagtacgagctgcttaggaggaacttcagcgacaccgggtgctttggtttcggtattcaggagcacatcgaccttggtatcaagtacgatccgtcaacaggcatttacggaatggac

SEQ ID NO: 29214 - DNA, 352 bp, Zea mays
  Clone ID: LIB3180-043-P2-M2-C10
tcggtttaaagctatgctttatgtccactccggatggtgaaaactgtggacttgtaaaaaatctagctgttactgctattgttagctcaagggtgatgcagcccttgattgagagcttcatttcttgtggaatgagtaagctgaatgacattcctactgaacacattcaaagaatggataagatctttttgaatggcaattgggtgggatcttgtgaaaattcagcttcatttgtatttcgattgaggtgcatgagacgcagcagtctgattgatcctcaggttgaaattaaaagggacaagcaccacaatgaggttcgcgtgtttactgatgcagggcgaattctcagacc

SEQ ID NO: 29215 - DNA, 421 bp, Zea mays
  Clone ID: LIB3180-043-P2-M2-C11
ttggttcattagctttatctactccagagcgcagaagaacccgatcgacaccatgagggtgttgctcgttgccctcgctctcctggctctcgctgcgagcgccaccttcacgcatacaagcggcggctgcggctgccagccaccgccgccggttcatctaccgccgccggtgcatctgccacctccggttcacctgccacctccggtgcatcttccaccgccggtccacctgccgccgccggtccacctgccaccgtcggtccatgcgccgccgccggttcatctgccgccggcaccatgccactaccctactcaaccgccccggcctcagcctcatcctcagccacacccatgcccgtgccaacagccgcattcaagcccgtgccagctgcaaggaacctgcggcgttggcagcaccccg

SEQ ID NO: 29216 - DNA, 432 bp, Zea mays
  Clone ID: LIB3180-043-P2-M2-C12
ttggagtccttcaccttgacctcatggtgcgtccactgtccgtgcacagtgtcatacttgaacatgtaggtcatgtaatcggtgctgatgaaggggtccaagacccttctctttggtgagaaggaggttgctgtgtttggctgcaggaaccctgaggagatcccatggggttccgttggcgctgaatatgttgttgagtctactggtgttttcactgaccaagagaaggctgcagctcacttgaaaggtggtgccaagaaggttgtcatttctgctcctagcaaggatgcccccatgttcgttgttggtgtcaacgagaaggagtacaagtctgacatcaacattgtctctaatgctagctgcacaaccaactgccttgctccgcttgctaaggtcatcaatgacaagttcggtattgttgagggtctgatg

SEQ ID NO: 29217 - DNA, 420 bp, Zea mays
  Clone ID: LIB3180-043-P2-M2-C2
tctctatcactgccaagagagtgagcgagcgagcagaggcagcgcagcaatggcggcggcaatagtactctccggccaggtgcggccgcttccctcgtcgctgcccctgtccctgctgctgctcctcctcctgtgctgctccggcacctcgtggggatggagcacgtcccggggaggagccgccagggagtgcggcttcgatggcaagctggaggccctggagccgcgccacaaggtgcagtctgaggccggctccgtccagtacttcagccggttcaacgaagccgaccgggagctcacctgcgccggcatcttcgccgtccgcgtcgtcgtcgacgccatgggcctcctgctccctcgatactccaacgtccattcgcttgtctacatcgtccaagggagagggatcattgggttctc

SEQ ID NO: 29218 - DNA, 180 bp, Zea mays
  Clone ID: LIB3180-043-P2-M2-C3
ttgatagttcatgatcctcccaactggtgcctcgtcgttcaaggaggccatgagcgtgggaatttaggtttaccacaacctgaagagcataatcaagataaattactgtcaggatgctacaaatgttgtggatgaatgtgtgcttgctctctaacattaaggaaaacaaataaggtcttt

SEQ ID NO: 29219 - DNA, 273 bp, Zea mays
  Clone ID: LIB3180-043-P2-M2-C4
agaagcttggagcaaatgccatcgtggcggtttcacttgctgtggggagagctggagctatggtgaagaagattcctttttaccagcacatcgcaaatcttgctgggaacaaaactctggtgctccctgtacctgcctttaatgtgattaatggagggtcacatgctggaaacaagcttgccatgcaggagttcatgatccttccaactggtgccttctcgttcaaggaggccatgaagatgtgagttgaggtgtaccacaacctgatgagca

SEQ ID NO: 29220 - DNA, 308 bp, Zea mays
  Clone ID: LIB3180-043-P2-M2-C5
tgttggttacgagacgggagggggagcgagcacaaacctgaataaagaaaggggcgggaaaagcgagggcactgcgcctccgctgcggcctgcggcgcccgcgccagccaacccctcccttctaccagtaccagtatttggttggttatttatatgtatatataaaaccggcgctcactccaccactgaccactctaccgagccgagcgccgggcggcctttggactcgtaccactccgcaggcggaacggaacacgggcgagggcgtcttcaccctcccgagctcgtcgtcaccgtcaccgcaccac

SEQ ID NO: 29221 - DNA, 298 bp, Zea mays
  Clone ID: LIB3180-043-P2-M2-C6
tttttcgtaccaggtggccatggactgcgctgagatggatcagaatcaggaggacatacggttactgatgccggtgcaattttgcatgctgcccgagttctcattggacccggtgcccccatactactcgtactccaacgctggcgcggggatgccgattcttgctatggcagcaagaataggtggcggcgcacgggggatgtaactcaaacggatccgcctgatgggaaagccgatggccagcccccagcccatgagcttctaccagcagatgggcacggggactgcttgagctggc

SEQ ID NO: 29222 - DNA, 293 bp, Zea mays
  Clone ID: LIB3180-043-P2-M2-C7
tcttttgtagtacgtgaccaagacctaaaggggctaccactgaccgggcacagggtggtactataacatttatgtcatgtatattgtgctgatgaactggtacaagacccttctcttacatgagtaagaggttgctgagtttgtctgcagcaaccctgaggagatccctttgcgtatctttggcactgaatattttgtctgagtctactggtgttttacactgaccaagagaaggttgcttcttacttgaagggtgctgccttgatagttgtcaattctgctcctagcaagga

SEQ ID NO: 29223 - DNA, 433 bp, Zea mays
  Clone ID: LIB3180-043-P2-M2-C8
aataagcagccaagggtatctctttgggagatggaaccgttgacaacttgggcggtgtatccatctccttttgctcttggattaaagcgcccatggcctgcaggcctgccttctttatacggtggaaggggtgatggcttgacctcttctcttatgtggcttcgagacagggcaaacccgggtttccagtcactgaatttcagcgggcttggtatgagtccctggatgcagcctaggctggataattccttacttggtctccaatctgacatgttccagaccatagcagcagcagcagcattacaaagcactacgaagcaagttccaccttcagcaatgcagttccaacagcctcaaaacattgctgatagatctgctcttttatcaagtcagattcttgcacaagttcaacctcggtttcagcatatttacc

SEQ ID NO: 29224 - DNA, 338 bp, Zea mays
  Clone ID: LIB3180-043-P2-M2-D10
aaagagggctaaatggtgaagcacaacaacgtcattttataattttttctttaagtagcattggttgtactatgtcaagacatgtttcaaccagcccgcccgcaagcagaggcgccgcattgtacgttaaaagaaggctgtgaagatatttccacgaccaactgctggccctcttcgtcccattgttcaatgccagactctcaagtacaacatgaagtcaagggctgggagaggctttacccttgaggagttgaaggctgcgggcattccaaaaaggcttgctccaaccattggcatttctgtggatcaccgccgcaagaacaaatcccttgaggggc

SEQ ID NO: 29225 - DNA, 451 bp, Zea mays
  Clone ID: LIB3180-043-P2-M2-D11
ttccagagccccccgccgccgctgggccctcctttcggtcctgccgtccgtcgaggtaaaaggacagcatggtgagggtcagcgtgctcaatgatgctctcaagtccatgtacaatgctgaaaagatagggaaacgtcaggtcatgatcaggccgtcatccaaggtgatcatcaagttcctgacggtcatgcagcgccatggctacattggtgagttcgagtacgtggatgaccacagagctgggaagatcgtggtggagctgaatggaagactgaataaatgtggtgttattagcccacgttttgatgtaggtgttaaggagatcgagggatggacggcgaggcttcttccatctcgccagtttggctacatgcgcctaacaacttctgctggaattatggaccatgaggaggcccgccgtaagaatgttgggggcaaggttctaggttc

SEQ ID NO: 29226 - DNA, 260 bp, Zea mays
  unsure at all n locations
  Clone ID: LIB3180-043-P2-M2-D12
ctgtacgcctgaggaccgggaggaacgggggttttacccatttgttactaacatgcgntttttctgccaaaaggggggaccttccaacttcgagcggctcaagtacggggaagggcttcaccccggaaccttcggcggttattggtgaagagggaaacacccacaggggtttttacaccattgggggaggaccagaacccgggggcccagatctttaacccccccaccaggccttccgccgcngcccccctggattacca

SEQ ID NO: 29227 - DNA, 103 bp, Zea mays
  Clone ID: LIB3180-043-P2-M2-D2
catataggctttaacaagtaattgcagaaagcaacatacctttatcgccttggtgtgtcaaaaattgtcagccctattttggtgcagtcaatggtacaaacca

SEQ ID NO: 29228 - DNA, 247 bp, Zea mays
  Clone ID: LIB3180-043-P2-M2-D3
ttaccccttcttttattcaagtgccaccaatgagcaacaatggagaccaagatattttccctccttatgctccttgctctttctacatgtggtgctaacgcgacaattttccctcaatgctcacaagctcctatagcttcccttttttccccatacctttcatcaaatatagcttcaggatgtgaaaacccagctctttaaccatataggctttaacaaagcaatcgcagcaagcgacataccttta

SEQ ID NO: 29229 - DNA, 433 bp, Zea mays
  Clone ID: LIB3180-043-P2-M2-D4
tctccccgctccgcctccactcctcgcgccggtgccgcatctcctctacaggtaagaaggagagaaagagggcgaaatggtgaagcacaacaacgtcatccccaacgggcacttcaagaagcactggcagaactatgtcaagacatggttcaaccagcccgcccgcaagcagaggcgccgcatcgcacgtcaaaagaaggctgtgaagatattcccacgaccaactgctggccctcttcgtcccattgttcaatgccagactctcaagtacaacatgaagtcaagggctgggagaggctttacccttgaggagttgaaggctgcgggcattccaaaaaggcttgctccaaccattggcatttctgtggatcaccgccgcatgaacaaatcccttgaggggctgcaggccaatgtccagaggcttaagacatac

SEQ ID NO: 29230 - DNA, 331 bp, Zea mays
  Clone ID: LIB3180-043-P2-M2-D5
tcggtaggtgtgaagatgtttgctgggtgaaaacgaaccaaaaaaaatgcggttccaatcttgcggattgcctaaaatccttggtggcgcccttaaaagggccttggttggttggccttaaaaggaactggccggggtaccccggttggccatgtaatccatgcgaattttgccccaattttaataatagctgaggaaccacccgttggttaaccaaagaagcctggggccttgtccaggatcattgacctttttgggcttggaaggggcgggttcgaactttttggaggggatcataacatccgcccggggtggctaacccttggaaaaa

SEQ ID NO: 29231 - DNA, 405 bp, Zea mays
  Clone ID: LIB3180-043-P2-M2-D6
atcggttgcaaaccatggacatggctttggcgtctaaagcctcccctccgccatggaatgccaccgccgccgagcagccaattccaaagcgtgacaaagccgctgcaaatgattcaacatacctcaatcctcaagctcatgatagtgttcttggaatcattctgggaggtggtgctgggactagattgtaccccttgacaaagaagcgtgccaagcctgcagtgccattgggtgccaactatagactgattgatattcctgtcagcaattgtctcaacagcaacatatccaagatctatgtgctaacgcaatttaactctgcttccctcaaccgtcacctctcaagagcctacgggagcaacattggagggtacaagaatgaagggattgttgaagtcttagctg

SEQ ID NO: 29232 - DNA, 381 bp, Zea mays
  Clone ID: LIB3180-043-P2-M2-D7
tgggcccttcaccattgccaacaacatgtcgcttgtctggaacaaattcggttgggacacgatctcaaatatcatatttgttgatcagccaaccggaactggctttagctacagctctgatgatcgtgatactcgtcatgatgagattggtgtcagcaatgacctatatgactttctccaggtgttctttaagaagcacccagaatttgcaaagaatgacttctttataactggagaatcttatgctgggcactacattccagcatttgcaagcagagttcaccaaggaaacaaagcaaacgagggcattcatataaacttgaagggatttgctatcggcaacggtctcactgatccagaaattcaatacaaagcctacac

SEQ ID NO: 29233 - DNA, 423 bp, Zea mays
  Clone ID: LIB3180-043-P2-M2-D8
tcacggttccacctctccaaaccaaaaactcctaggttttctaaacgtgaattccaatcactgcacacgcggttgtttcggtgtgatttgccaggaagacggggcgaattcgtggtgctacctaaaagagaccccatctggtgcggttctggggttcgaggagcggcgaggcaggtgggaaatgagggatgtggtcgtggttgacgaagattgcgtccgcgtgcttgggcccggtccggaggtgcgcgcgtacgaggaaggatgaggacgacagcgataatggccgcggcgtcgccgacgacctgctgtggtcgcgggacctcgggcgccacgcgggggtgtagttctcgtttgctcgtcggcaggccaacgaggcgttggaggaccacagtcaagtggagacaggcttctgtcgaacttttg

SEQ ID NO: 29234 - DNA, 412 bp, Zea mays
  Clone ID: LIB3180-043-P2-M2-D9
tggatatgatactatacttacaaacagctgggtgaattctcctggtcatggctatttatacaactttcagacgaaggagctctatgatcttagttatgggcatgaaccaccagaaggtcctacaagatttggagattactttgtgacaaaatgtggtgtccttctaatgtcactctttgtctttttcacaaccaccatgtctgtttcatttactttgagagaaacacaatcccgcatgcttagattcacagtgcagcttcaacaccatgcacgccaccacctgccaacctttcagttgatattcgtgcatgtcatcgaatcattggtttttgtgccgattatgattgggattctcttttttctatttgagttctatgatgatcaattgtttgcgttttttgttttgactttt

SEQ ID NO: 29235 - DNA, 390 bp, Zea mays
  unsure at all n locations
  Clone ID: LIB3180-043-P2-M2-E3
tacttttnctaactccggggctccaccactagcaacccttgcagcgagcccaccccgaccactgccatgtcgaggcgcggcgactgggtctacgagaacaacggcgggacctgcggggccatcggcggcgccgattactgtgtcgtcgcggcggacacccgcctctctgtcggatacagcattctcacgcgcgaccactctaagatctgcgacctggctgacaaatgtgtactagcatcttctggctttcagggtgatattaaagctctgcacaagaacctagctgccagagaattgctataccaacaccagcataacaaaaggatgagctggcctgccatggcacagcttctttccaaaaccctggactacaagcgcttttttccatat

SEQ ID NO: 29236 - DNA, 438 bp, Zea mays
  Clone ID: LIB3180-043-P2-M2-E4
ttttaacaagcaacatagaaaggggaatccagtagcaacaatagagcaacaatggagaccaagatattttccctccttatgctccttgctctttctacaatgtgtgctaacgcgacaattttccctcaatgctcacaagctcctatagcttccctttttcccccataccttccatcaattatagcttcagtatgtgaaaacccagctcttcaaccatataggcttcaacaagcaatcgcagcaagcaacatacctttatcgcccttgttgtgtcaacaatcgccagccctatctttggtgcagtcattggtacaaaccatcagggcacaacagctgcagcaactcgtgctacctgtgatcaaccaagtagctctggcaaacctttctccctactctccgcaacaacaatttcttccattcaaccaactgtctacactg

SEQ ID NO: 29237 - DNA, 359 bp, Zea mays
  Clone ID: LIB3180-043-P2-M2-E6
tcgttcgccacaccacaaacacccaccactgggctctcgcccgctggctttgggtcccccgctccagcttatggcggaggcggcgccagcagccggcggcggcatcggggacatcctcgccacgagcgatcgggacttcctcgtccgcaactccggcgagcaggtgaagatcagcagcgttgaggcgagccctgtggccatctacttctccgcctcatggtgcccgccatgcaggaggttcacgcccaagcttattgaagtatacgaaaaactggcctcacagggcaagagctccgaggtcgtctatgcttcggccgatcgcaatgaggaagctttcaatgaatactctgcaaagatgc

SEQ ID NO: 29238 - DNA, 231 bp, Zea mays
  Clone ID: LIB3180-043-P2-M2-E7
ttctataatctcttaatccgcaaacaccatcgacttgggcatatcatacatgggacggggcacaaccatccacacctacttcgatcaggatcccttagaccaaatcctactttaacacataattctctcaagcgatacagacttactttgcctcttctctacttgagcatttatatttaaatatcgtttaagttatccacttcttcatctacttacctctctttatactca

SEQ ID NO: 29239 - DNA, 396 bp, Zea mays
  Clone ID: LIB3180-043-P2-M2-E8
tggtttcgctctctgccgccgccaccgcacaagaagctagctcctgcctgtaccgccccgtcatggcgatgctatcccgcgcagcctcctccgcggcccggcgcccgctcctgccgccgcctaggcttctggcggtgagggcgatggcgtcgtcgctcttcggccacgtcgagccggcgcccaaggaccccatcctcggcgtcaccgaggctttcctcgccgacccctcgtccgacaaagtgaacgtcggcgtcggcgcctaccgggacgacaacggtcagcctcgcttgctcagctgcgtgcgcgaggcctagcgccggatcgcgggcaaccttaacatggaagaccttctcgatggaggcatctgtaagatgattgagagtcactgaagctgcg

SEQ ID NO: 29240 - DNA, 89 bp, Zea mays
  unsure at all n locations
  Clone ID: LIB3180-043-P2-M2-E9
gtttttaaaccnaacccacccaagcggcaaccgggagccctcccccgacggcgccgggggcacggcggagcggtggcgcgcggaggcaa

SEQ ID NO: 29241 - DNA, 451 bp, Zea mays
  unsure at all n locations
  Clone ID: LIB3180-043-P2-M2-F1
tttgataaactcgccgtctgccttctgcgcctgcagttcggtctctggcccttgcgggttcaatctcacctccaaccatgggtaaagagaagtcccacatcaacattgtggttattggccacgttgactctggcaagtcgaccaccacaggacacctgatctacaagcttggaggcattgacaagcgtgtgatcgagaggtttgagaaggaggctgctgaaatgaacaagcggtccttcaagtacgcatgggtgctcgacatgctcaaggctgagcgtgagagaggtatcaccatttgtatcgctctgtggaagtttgagaccaccaagtactactgcacggncattgatgcccctggacaccgtgacttcatcaagaacctgatcactggacctcccaggctgactgtgctgtccttatcattgactccaccacttgtggttttgaggct

SEQ ID NO: 29242 - DNA, 289 bp, Zea mays
  Clone ID: LIB3180-043-P2-M2-F11
tttttgtcgtgacgttatggatggaagcagggtgggtttcttggagaccctggggaatgatcttttggagcttcgaggcaagggtattgatgcacagattgcatctggtggtggaaggatgtatgttaccatggaccgttatgagaatgactgggatgtggttaatcgtggcttggatgctcaggtgctcttagaagcacccttacaaattcaaaagtgcacttgaggctgtgaaaacactgagtgcacagtccaaggctaatgatcaatacttgcccccatttgtgat

SEQ ID NO: 29243 - DNA, 272 bp, Zea mays
  Clone ID: LIB3180-043-P2-M2-F12
ttgatcttttaatctagatcgctagcggccgcgcttctttaatagattcggggggtgtctttttttaacatttaaccattttccaataacaaacaaaaattttcatgaccaaggccaaaacatttttaaaattgttaaacaaagcgataaaattgtaacattaaacctaaacttgctattgcgcttccatcaaatattataaattatctctatagaagaatctactactatagaatcagatcaatcaactcattgagtccatggatccaata

SEQ ID NO: 29244 - DNA, 238 bp, Zea mays
  Clone ID: LIB3180-043-P2-M2-F2
aatgctaaataggataaggagacccacccggggcgactgctctccggacccggaggcgcccatggcgttcgccgccgtcctccgcgcccgcctccttccggtgcccactccgctatccagctcctcgccgccgccattcttcgccccttcggcctacgtccgggtaccgggcctcacagcagcagcagcgcgcaccggacggtaccgacgaccgggcgggcgggctcaccgggcgggc

SEQ ID NO: 29245 - DNA, 279 bp, Zea mays
  Clone ID: LIB3180-043-P2-M2-F3
ttaatgcatctgcgtacacggtctccctcttcctgtcagtagtagagtgagagtgaggcatctagtgggagacaaggggaaatggggaagggagcgcaagggagcgatgcggcggcggcgggcggcgaggtggaggagaacatggcggcgtggctggttgccaagaacaccctcaagatcatgcccttcaagctcccgcccgtcggcccttatgatgtccgcgtgcgcatgaaggcagtggggatttgcggcagcgatgtgcactacctaagggagatg

SEQ ID NO: 29246 - DNA, 378 bp, Zea mays
  unsure at all n locations
  Clone ID: LIB3180-043-P2-M2-F4
natggttctagatcgcgagcggaacgcctccgggctcactaatcccagagagggggcatggctactcaccgtcactgccttccactccttctcgtggccgccgccctcgcccttgccggcggcatggtcacgcggctctaagcagaggacactgcccgcttctatgcggtttgaacccaatccctggcgtgagcgactcgcacataacaggagctaggcacctgggcgcttgggcatcctaagcaccaaaacctgttcttcgaccggcccccgttccaaacttttcccctaaaagagccccccctttacccccccaaaaacctccgggaaaacttctacctagtccacaacacaaaccgacatttcccctggggcatt

SEQ ID NO: 29247 - DNA, 442 bp, Zea mays
  Clone ID: LIB3180-043-P2-M2-F5
ttgttttcatccgtttcgctctctgccgccggcaccgcacaagaagctagctgctgcctgtaccgccccgtcatggcgatgctatcccgcgcagccttctccgcggcccggcgcccgctcctgccgccgcctaggcttctggcggtgagggcgatggcgtcgtcgctcttcggccacgtcgagccggcgcccaaggaccccatcctcggcgtcaccgaggctttcctcgccgacccctcgtccgacaaagtgaacgtcggcgtcggcgcctaccgggacgacaacggccagcccgtcgtgctcagctgcgtgcgcgaggccgagcgccggatcgcgggcaacctcaacatggagtaccttccgatgggaggcagcgtcaagatgattgaagagtcactgaagctggcgtacggagaagattctgacttcatcaaagataaga

SEQ ID NO: 29248 - DNA, 424 bp, Zea mays
  unsure at all n locations
  Clone ID: LIB3180-043-P2-M2-F6
ttgtgcacatgccagtgaagctctgcgtcgcgccaagttcaagttccctggccgccaaaagattattgagagcagaaagtggggcttcaccaagttcagccgtgccgactacctgaagtacaagagtgaggngtagaatgttcctgatggtgtcaacgcaaagctgctcggtaaccatggaagacttgagaagcgtgctcctgggaaggctttcctcgaggccgttgcttaagtccaatctacagttggaatgcgaatccagacgttttggtttagcctatcttattttgctttgtgcaacatgaattttaagtgtatggggtattacagtgccttgtgtgaacctgcttatctcgggctgaacatcggtatgcatggaagtacttaatttttgttctgctaaaattaaagtgttctgcgactt

SEQ ID NO: 29249 - DNA, 310 bp, Zea mays
  Clone ID: LIB3180-043-P2-M2-F7
tcggttaacctgcggcgttggcagcaccccgaacctgggccaatgcggcgagttgctgaggcatcaatgcagcccgacggcgacgccctactgctcgcctcagagccagtcgttgcggcagcagtgttgccagcagctcaagcaggtggagccgcagcaccggtaccaggcgatctttggcttgggccttcagtccattctgcagcagcagccgcaaagcggccaggtcgcggggctgttggcggggcaaatagcgcaacaactgacggcgatgtgcggcctgcagcagacgactccatgcccctacgct

SEQ ID NO: 29250 - DNA, 330 bp, Zea mays
  unsure at all n locations
  Clone ID: LIB3180-043-P2-M2-F8
tctgttacgcgtgggtcgnaaaggaatatcaattgcctcaagttcacatttcgcaggtctaccccagaccagggacgcctgctgctaggatgaagaaagtaccaagcaacgaagtgaagaagcggagccgtgaattgacttcagtcttcgaatcgttttcgccataccaaggaatggaaggcaaagtagagaagatctggatcaccgagattgcgtctgatggtgttcacctggtcggacataccaagggatacatccaggtgctggtaactgctcctgatagcatgttgggaacgtccgcggacgcgaagatcacgtctgtcggacgat

SEQ ID NO: 29251 - DNA, 141 bp, Zea mays
  Clone ID: LIB3180-043-P2-M2-F9
tcgatcattgtccgccggcaagccactcgactggggcccacttccaaattgtgggggcgaaatccagatcctccccaccgaacggctacgcatccgccatgctcgtcgccctcctctgcctcctcgcctgctgcgccggcg

SEQ ID NO: 29252 - DNA, 366 bp, Zea mays
  Clone ID: LIB3180-043-P2-M2-G10
tttcgctctcgacttcccatcccctgcggccccgccccccgactcttctgggggcggcgcgcccaatcggctcggtggcaggcttgcgcaccggctcggctcgggtccggttctaccgccaacgcgggccgccgcgctcccggatctcggtctagtcagagagttagcagacaaagatggcgacttatgagcccaagaacattctcataactggtgctgctggtttcattgcatcgcatgtcgccaaccgtctggtcaggaactatccccaatacaagatcgttgtccttgacaagattgactactgctccaacctaaagaacctcaatccttcacggtcttgaccaaatttcaaatttgtcaagg

SEQ ID NO: 29253 - DNA, 392 bp, Zea mays
  Clone ID: LIB3180-043-P2-M2-G11
gccgccgcccccagtccccgatccgaagctgtgcctcgtaccatttggagccaatggcgccgacgtcgaagctgtcgacgggcatcaagcgcgcttcgcggtcgcacgcgtaccatcgccgtgggctgtgggccatcaaggccaagaacggcggcgccttccccaaggccgacaaggccgccgccgccgtggaacccatgttctaccctgccgacgacgtcaagccccgcgttcccagcacccgcaagcctaagcctaccaagctcaggtcgagcatcacgcctgggacggtgctgaacctcctcgcagggcgcttcatggggaagagagtggtgtttctcaagcagcttaagtccggcctgctccttggctttgggccttttaagatcaat

SEQ ID NO: 29254 - DNA, 161 bp, Zea mays
  unsure at all n locations
  Clone ID: LIB3180-043-P2-M2-G12
ttaatgtaatactctctccctcgccgccggccagcttcgtcttctgccacgcgccagctncgggacaaaccactgaaggggggagaggactcgctcatatcgtcccgtggggggggactcgatcaaggggatgatcttcgcgatatcctgggggcccaagg

SEQ ID NO: 29255 - DNA, 416 bp, Zea mays
  Clone ID: LIB3180-043-P2-M2-G2
tttgtcttcggtatgtgaaaacccaattcttgaaccctacaggatccaacggggaatcgcagctggcatcttacctttatcacccttgttcctccaacaatcatcagccctattacaacagttacctttggtgcatttattggcacaaaacatcagggcacaacaactacaacaacttgtgctagcaaaccttgctgcctactctcagcaacagcagtttcttccattcaaccaactaggttcattgaactctgcttcttatttgcaacaacaacaactaccattcagccagctacctgctgcctacccccagcaatttcttccattcaaccaactagcagcattgaactctcctgcttatttacagcagcaacaactactaccattcagccagctagctggtgtgagccctgcta

SEQ ID NO: 29256 - DNA, 217 bp, Zea mays
  Clone ID: LIB3180-043-P2-M2-G3
tgtgagggagagagcacgggggcttgatcgaagatggatgccggagcaaagggggtgaaaaaagccgcggcggggcgtcccggcgggggcggccccaagaagaagccggtctctcgctccgggaaggccggcctccagttccccgtaggccgtatcggccgctacctcaagcagggtcgctactcccagcgtgtcggcaccggcgcccccggctacc

SEQ ID NO: 29257 - DNA, 414 bp, Zea mays
  Clone ID: LIB3180-043-P2-M2-G4
catcgatctcgtttcaaatccatccatcctcgtttcctccgtcccgcaggatctcaaccccatggccaagatcaagatcgggatcaatgggttcggcaggatcggaaggctggtggccagggtggccctgcagagtgacgatgtcgagctcgtcgccgtgaacgaccccttcatcagcaccgactacatgacctacatgttcaagtacgacactgtgcacggacagtggaagcaccatgaagtcaaggtgaaggactccaaaacccttctctttggtgagaaggaggttgctgtgtttggctgcaggaaccctgaggagatcccgtggggttcggttggtgctgaatatgttgttgagtctactggtgttttcactgaccaggagaaggctgcagctcacttgaagggtggtgc

SEQ ID NO: 29258 - DNA, 351 bp, Zea mays
  Clone ID: LIB3180-043-P2-M2-G5
tttcttcattgcatcaagaataacacacaggatatatgtagtggatgatgaccttgaggttgttggtgttgtgactctgcgtgatgtgatctcatgctttattcatgagccacccggttattgcgacaactatttggcttcagcgatggagaagcttgaggggaaaggagtcagatcagtggagaaaatttgagcttttctgtagcgtgaatgttgataataacaggtcagtatgtgaggaaggtttatttggttggaacggtgcattcgtgtcgtgttaatccagcaaatccttgtgtggttaagtaacatggcttctgtgctgttaaaaatattttactatgtcatttt

SEQ ID NO: 29259 - DNA, 245 bp, Zea mays
  Clone ID: LIB3180-043-P2-M2-G6
actaaaccatctagcactgctctgctagagaggaggatatttcaccgtccttgcggagcaaaggctcaaaagtatcgtgtggagaacttgttcaagggaccccctgatgatgcgcattccaatgctctcagaaactgcgatccagagggtcctcttatgctgcatgtttcaaagacgaaacctgcatcttacaagggcaggttctttgccttctgtcgtggcttcttagggaaggttgctactgg

SEQ ID NO: 29260 - DNA, 276 bp, Zea mays
  Clone ID: LIB3180-043-P2-M2-G7
tttttcaacaccaccttgcctgcgatctccggagcctccgtcgcgtcgagcatcgatcatgtcggcctactgcggaaagtacaaggatgagctcatcaagaatgctgcctacattggcacccctggcaagggtatccttgctgctgatgagtccactggcaccattggcaagcgcctttccagcatcaatgtcgagaacgttgaggagaaccgccgtgccctccgtgagctcctattctgctgccctggtgctctccagtacatcagcggtgtgat

SEQ ID NO: 29261 - DNA, 368 bp, Zea mays
  Clone ID: LIB3180-043-P2-M2-G8
ttgttttaggaggagaggaggagatggcgggcacgatcacgtgggtgaaggcgggggagatcttcgacagccgcggcaaccccaccgtcgaggtggacgtgggccttagcgacggcagctacgcgaggggggccgtacccagcggcgcatccactggaatatatgaggccttggagttgagggatggaggatctgattatcttggcaagggtgttcttaaggctgtcagcaatgtaaataacattattggaccagcaattgttggaaaggaccccactgagcaggttgagattgacaacttcatggtccaacagcttgatggaacctccaatgagtggggctggtgcaaacagaaacttggagcaaat

SEQ ID NO: 29262 - DNA, 220 bp, Zea mays
  Clone ID: LIB3180-043-P2-M2-G9
ttttgatctcgtttcaaatccatccatcctcggttcctccgtcccgcagcatctgaaccccatggccaagatcaagatcgggatcaatgggttcggcaggatcggaaggctggtggccagggtggccctgcagagtgacgatgtcgagctcgtcgccgtgaacgacccctttattagcaccgactacatgacctacatgttcaagtacgacactgtgcac

SEQ ID NO: 29263 - DNA, 309 bp, Zea mays
  Clone ID: LIB3180-043-P2-M2-H1
tcgggcgtgcaagaagatcctcgtcgacaaggaggatgaggaggaggaggacgaagccggcggcggagaggatgacaagaaaaaggttgaatgatcaaagttcttggccaagaaggtagcaatgtcgtgaagcgtacgtgaactggaaacggatggacaagtatatttggagtttgatgtggtgtttccggatcgtgtgtttgtctcagatgaaaaaaatacaatattttgagtccaaaaaaaaaaaataattataatattaaattaataataaaaaataaataaataaataaaaaatttatttttttt

SEQ ID NO: 29264 - DNA, 267 bp, Zea mays
  Clone ID: LIB3180-043-P2-M2-H10
tttgatcgtttgaacaggctctaggactttctttgaatggcataattgaaataggctgttcaaaagatattaaagtccaaggtattattggaccatgcacatttttggagaagaaaggagccatgtgctttgacacagttgtcggtcaaggaaatacatcatcatggaaaatgtgtggtctcgatagaaatacttcttttacagtatttgttgatgtctcaccgagtgaactgatcgagccagccaggaaaccaaaatgcccatttt

SEQ ID NO: 29265 - DNA, 320 bp, Zea mays
  unsure at all n locations
  Clone ID: LIB3180-043-P2-M2-H11
tgaatgtctcttcctgtcagcagtagagtgagagtgaggcatcgagtgggagacagggggaaatggggaagggagcgcaagggagcgatgcggcggcggcggccggcgaggtggaggagaacatggcggcgtggctggttgccaagaacaccctcaagatcatgcccttcaagctcccgcccgtcggcccttatgatgtccgggtgctcattaaggcggtggcgatttgttgcattttnnnncactacctaagggagaagcgcatcgtgcactttttggggaatgagcccatggtgatcgggcacgagtgctcgggcttt

SEQ ID NO: 29266 - DNA, 347 bp, Zea mays
  Clone ID: LIB3180-043-P2-M2-H12
cctgcgccggcggttcgttcgtgtggaggggggaggagaggaaatggcggcgaccgagggcgtgctcctggggatgggcaaccccctcctcgacatctccgccgtcgtcgatgacgccttcctgacaaagtatgacatcaagctgaacaatgctattctcgctgaggagaagcacttgcctatgtatgacgagttggctagcaagagcaatgttgaatatattgccggaggagccacccagaactctatcagggttgcccaatggatgcttcaaactcctggtgcaacaagttacatgggatgcattggaaaggacaagtttggggaggaaatgaaagaaaacgctc

SEQ ID NO: 29267 - DNA, 137 bp, Zea mays
  unsure at all n locations
  Clone ID: LIB3180-043-P2-M2-H2
ccgatcattacccancgccccccacccccgggggggaaaagtaagagaaacaaggggcgccccccaccaaccccccaaccgggggcccccgatcccccccaaccaccccggacccaccccccccggccggaaaaagc

SEQ ID NO: 29268 - DNA, 236 bp, Zea mays
  unsure at all n locations
  Clone ID: LIB3180-043-P2-M2-H3
aataatcatcatggcgtnccctcagatctccggcagagccctaggcctcctgggggtcatcgccgcagcggccgcgatcgtctcgcccgccaccgccgacgaggtggtggccctgacggaagccgacttccagaaggaggtcggccaggaccgcggcgccctcgtcgagttctacgccccatggtggggccactgcaaaaagcttgccccccagtatgaaaaacttggccccagct

SEQ ID NO: 29269 - DNA, 412 bp, Zea mays
  Clone ID: LIB3180-043-P2-M2-H4
ttgcttattgtggagatccagctgaatcgggttcagaaccggctgagacaacagaagattcatctccagtacactgcggaagcgcgggagcttctggggtctcttggctttgaccctaactatggtgcgaggcctgtcaagagagtgattcagcagatggtggagaacgagattgcccttggtgtcctgaaaggcgatttcaaagaagacgatactgtcctcgtggatgtaagttcggcggcgatcgcaaaaggactcgctccgcagaagaagcttgtccttcagagggtagaaaacggaaacgacgagttagttgctaatgactaggtcagaagggatcaccttttagcgagaatgttcaagtgtgatgaaacgcagctgttagctctgcgttttcgcgtatgagaaactt

SEQ ID NO: 29270 - DNA, 257 bp, Zea mays
  Clone ID: LIB3180-043-P2-M2-H5
ttgcataacttctccaccagtcgtccagtagtccaccagccagcagctcgccggcgtgcctcgctcctgctctgcactgcactgcactgcactggtcgccgctcgagctacccggctgtagcaactagcaagattcgttgggtccgtgaacgtgcagacgcagcacactagactgtctagacacacattatcagattcgttctgcagtacaataatgggagcctgcaactcgtgcgaggccacggcggtggcggctg

SEQ ID NO: 29271 - DNA, 326 bp, Zea mays
  Clone ID: LIB3180-043-P2-M2-H6
acgttgctccggccgtcggccgccgctgccgccctattttgaccccatcgccggcgacgataatcgccagtttgtggataagggtcttttaagtcttcatatgaaactatccttttgatatacagctgaaggacaataactatcatggatgctactgcaaattcagatgtgcaaagggctgaggaatttaaacttaaggcgaatgatgccttcaaggcaaacaagttctcgcaggctatagagctttacagtcaagccattgagctgaatagttcaaatgcagtttactgggcaaaccgtgcatttgcacacacaaaattagagga

SEQ ID NO: 29272 - DNA, 220 bp, Zea mays
  Clone ID: LIB3180-043-P2-M2-H8
ttggataagtattatggccaatctcaattttggaggcctggaccaggtttctatgagagtgccacctctgtctccagtggcaggcgccagtgtcagcctctcgcgcactggaacccgagcatttggccgggcgggtgcggctgctttttctgaacttaccaatggagagttcaacgaggcttagattaaaaaaatcatgggccatgatcccctaacttag

SEQ ID NO: 29273 - DNA, 274 bp, Zea mays
  unsure at all n locations
  Clone ID: LIB3180-044-P2-M2-A1
tggagtaattttgtgncagcaggcgancgaaccacttgtctacagaaagagggactgggaagaatattgcgctgcaacaatcatcccgaaccagctggtaaatctggaaaggtaggttgaaaatgctgggacagcttttctagctcttcgaacaagaggtcaaccgagttatatcagttgaggagtaagcacaggaactaaatcttgtgccgacacaatacctccaatgtgtcaagactggatcaagaaaattgggtcggtaaagccttaaact

SEQ ID NO: 29274 - DNA, 302 bp, Zea mays
  unsure at all n locations
  Clone ID: LIB3180-044-P2-M2-A10
taacaaagtgacgcgagcacgagcatccagggnttccccttcttccccatggggtgccctcaccgcagccatcttccatggcggaccagctcacggacgagcagatcgcggagttcaaggaggccttcagcctcttcgataaggatggcgacggctgcatcactaccaaggagcttggaactgtgatgcgctcccttggccagaaccccactgaagcagagcttcaggacatgatcaacgagggtgatgctgatggcaatgggaccattgactttccagagtttctggacccgatggcaagg

SEQ ID NO: 29275 - DNA, 368 bp, Zea mays
  Clone ID: LIB3180-044-P2-M2-A11
ggacgcgtggggtaatttgcctattctgaaccaaccagtgtgctccattgcgctgggttcctgggttccgaaaattggtgatctgaacagtcgtccattggctatgttgcgacctaatgcatcacttagctctgcccttaacatgttggttcaagctggagtaagctcaataccaattgtggatgacaacgactccctgcttgacacttactctagaagtgacatcacagccctagcaaaagacaaggtctacacacatgttcggctggatgagatgaccattcaccaggctttgcagcttggacaagatgccaatacaccttttggattctttaacggccagagatgccagaagtgccttcggtctg

SEQ ID NO: 29276 - DNA, 294 bp, Zea mays
  Clone ID: LIB3180-044-P2-M2-A5
ttgttctgctgcagatgtgctccgattccccgcataaccgtgcgcttcttgtacgcgagggcgccatcccaccgctcgtcgcgctatcgcagtctggctctgcccgtgccaagcacaaggctgagactttgcttggctacctgcgggagcagcgacaaggggttgcctgcagagctggagcagtggcagctactagcttggctaggtaaaaaggcaagagctatggtcgaaatctgctccatttattctctgtgagaggtgttgagagcagatcagcgaccccaggggggcgca

SEQ ID NO: 29277 - DNA, 52 bp, Zea mays
  Clone ID: LIB3180-044-P2-M2-A7
ttcttatgctttacgtcgcgaccgaacggcgacgctgctcctttatggacgc

SEQ ID NO: 29278 - DNA, 173 bp, Zea mays
  Clone ID: LIB3180-044-P2-M2-A8
aataatccactcgcaacaccccaaaaacctgagggtctctcgaccgggcggtcgcacctcgtaaacacgccggcatgaggggcgcccacccccgtgcctatataacgctgctcgagcgaagggtataagctggtatcatggcgtccagcgcagtatcaccaaaatggttaagg

SEQ ID NO: 29279 - DNA, 296 bp, Zea mays
  Clone ID: LIB3180-044-P2-M2-A9
tgacctttctttggagagttttggttcctttgcacaaaccaaaatctgtgggtgcgtaccttcagcagttgacctactgtgtgacacagtttatagaaaaggatccagagctcgcaagcccagtgataattggtttgttgaggtactggccaataacaaattgtcagaaggaagtgatgtttctcagcgagatcgaagagatcttggaggctaccagccaggcagaatttcagaaatgtattgcaccattgttttggggaattgctcattgtattaccagtgcttactttcaggtt

SEQ ID NO: 29280 - DNA, 263 bp, Zea mays
  unsure at all n locations
  Clone ID: LIB3180-044-P2-M2-B1
ctaaaagcaagccgcccgcacgcacgtacccgtccttaattccccgacccacccactcgtgatacctatcttccgcccttttttttggctgggaacaaaacaaaatcgggtggtgccttttacaaccatcatttttcaattatcctataaaatcaaaacatcctgaaatcatatctaatatgtccacatttcacccaccatgtacattnttaactcccaaaaaaaaagcctattccctcataccccgttcaatcctaacaact

SEQ ID NO: 29281 - DNA, 57 bp, Zea mays
  Clone ID: LIB3180-044-P2-M2-B12
tcttctgctcatatggatttactggtgcttttgctgaatgcctatgaggaagggggg

SEQ ID NO: 29282 - DNA, 331 bp, Zea mays
  unsure at all n locations
  Clone ID: LIB3180-044-P2-M2-B4
tttcctantgttaagcacaanagngnaccaacaatggcagctaaaatatgtagcctgcgtatgctccatgggctttctgcaagtgctgctacggcgaccattttcccacaatgctcacaagctcctatagcttcccttcttcccccgtacctctcaccaacggtgtctttggtatgtgaaaacccaatttttcaaccctacaggatccaacaggcaatcgcagcttgcatcttacccttatcacccttgttcctccaacaatcattagccctattacagcagttaccctttggtgcatttattggcacaaaaacattaggggcacaacaac

SEQ ID NO: 29283 - DNA, 145 bp, Zea mays
  unsure at all n locations
  Clone ID: LIB3180-044-P2-M2-B7
tctgatagctctttttcccctncanggcncgcgagccgcattttgcagcggggggtggcgccaaaatcttncccatgctcttctacatggacaaggtggagaacaatgacctgttcaatggcacctacagtgccgtccaccttcc

SEQ ID NO: 29284 - DNA, 398 bp, Zea mays
  Clone ID: LIB3180-044-P2-M2-B9
tgtccgacatcatgaaggaggacgacagcaactggcccgagcccgaccgcatcggccgccaggagctcgagatcgtcatgggcaacgagcacatttcattcaccacttccaagatcggctccctcgtcgatgtccagtccagcaaggacccggagggcctccggatcttctactaccttgtccaggatctgaagtgtttcgtgttctcgctcatcaaccttcacttcaagatcaagccaatccagtcttgagctccatcccaagccttcatgtagctggtttgtgagactgcgagtgttttgagagagaaccttttaaccatgtaagatgatgttgatattgaggacgatgcgcgcgatcgaccctgtgtggtgcacttagtggaagtgggacccccc

SEQ ID NO: 29285 - DNA, 210 bp, Zea mays
  Clone ID: LIB3180-044-P2-M2-C1
taaatgtattggaagcagaaaaccaacggagggtcattcttagattgaaggccgtgaccaaaaatctcaccaaaacagtgaggacagctattaaagagatcatgaatatggtcgttatggttatgattcgtattatgaaagaagcaagaaagatagtatcttgataatacactattcatgtgacaacaaacgttaaaagagtacattaat

SEQ ID NO: 29286 - DNA, 296 bp, Zea mays
  Clone ID: LIB3180-044-P2-M2-C10
tctgtttctagggaagcagcacgcagactatcgtgatctaagccactgaggctgaggccacgctgacatgggaccttactgtgctggggtgggaggtgaactacaaggaggagttcgtgcctgcagacgagggctcctacaccatcatggtcaggaagggcaagaagatggcgtccggcgaggaggcggtccgcaactagttccgcaccggcgagccaggcaaggtcgtgctcaccgttcagaacacctcccacaggaagaagaaagtgctgtttaagcacaagggcaagagcgcc

SEQ ID NO: 29287 - DNA, 269 bp, Zea mays
  Clone ID: LIB3180-044-P2-M2-C11
cccagcgtttttccttccagttaccccacttgctctctttctccccagtagcaacgaccgggcgtctcgcgccgactaaaccctactcatgtacccaggtctgcgtgggcccttgccggcgatgagaacccgcgttcaaagatggctcgcgtggattgatggaacaggacttaagcaaactggatgtgacgaagcttaccccctgtcacctgagttatctacgccaagcaacaataatatgggtaccattggccatgtggctcatggaa

SEQ ID NO: 29288 - DNA, 55 bp, Zea mays
  Clone ID: LIB3180-044-P2-M2-C12
tttactctctaacaaaacaggaatcctcaacagctgcatccaaaaaatatacttt

SEQ ID NO: 29289 - DNA, 347 bp, Zea mays
  Clone ID: LIB3180-044-P2-M2-C2
tctcttctgtcgccaccatcgcctcgcggccgcctgccgctccgctcgaaaggtgttagtgaagattttttgaagccgagaagatggtgctgaagacggaactctgccgcttcagtggccagaagatctatcctgggaaaggcatccggtttattcgtgctgattctcaggtttttctttttgccaactcgaaatgcaagcgctacttccacaaccgcctgaagcctgcaaagcttacctggacagcaatgtacaggaagcagcacaagaaggacatccatgctgaagctgtcaagaagaggcgccgcgccaccaagaagccatactcgaggtccattgtgggtgct

SEQ ID NO: 29290 - DNA, 240 bp, Zea mays
  unsure at all n locations
  Clone ID: LIB3180-044-P2-M2-C3
aataattctcgacccaaanccanccatccgcgggccctccgtacgggaggggggtcgccccatagccacaaacaagatcggtatcaatgggttcggcaggaacggaaggctggtggccagggtggccctgcagagtgaccatgtctagcatcgtcgcgggaacaaacccctcatcagaaccgactacatgacctacatgttcaagtaccacactggtcacggacagtggaagcaccatga

SEQ ID NO: 29291 - DNA, 307 bp, Zea mays
  Clone ID: LIB3180-044-P2-M2-C5
gggataaccacccctaagaagatttttccatatgacatggaggcacctgattcttgcaatgagctggcagccgttgaatatgttgagcacatttacagattctacaagagcactgagggcacctgccttcctctcagcagctacatgagctcacaggctgaaatcagtgaaagaatgagagctatccttatcgactggattattgagggacagtacaggcttactctaatgccagagacactttacttgacctgttacatcatcgaccagtactttatttatggagagtgttccaagtaaggagctt

SEQ ID NO: 29292 - DNA, 323 bp, Zea mays
  unsure at all n locations
  Clone ID: LIB3180-044-P2-M2-C7
tgtcttttaaggaaagccaggctaagattaagcgctacatgacaatgatggattgcatgactgatgcanagcttgacagcacaaatcctaagctgatgactgaatcacggatcattcggattgcacgggggtctggtcgtcctgtcaaggatgtcatcgacatgctggaagagtataagcggcttgctaaaatctggggcaagatgaagggtctcaagatcccaaagaaaggggagatgagtgcactgtcccgcaacatgaatgtttaacacatgagcaaggtccttccttcgcagatgcttaaacagattggtggcatgggc

SEQ ID NO: 29293 - DNA, 320 bp, Zea mays
  unsure at all n locations
  Clone ID: LIB3180-044-P2-M2-C8
taactantttattctagctacagcagtcatggggctcactttttacctaattgagtaatgaattaaatgcatcaatgtcccttgaagttgtcaagagatgccacttatgtccactaactttgaaaatatatttatgggttcctaattaacttgataagtggtgcacttcacatacttaaacttgcaagtccatttctggacatcatccataacatccattcctaatctcttttagttcactttacaaccataattacaagtttggggccacttcttcattatacttctttaattataaaccccccttttaaactatttaa

SEQ ID NO: 29294 - DNA, 390 bp, Zea mays
  unsure at all n locations
  Clone ID: LIB3180-044-P2-M2-C9
natgattaaaactaaagattnctctggaggttggcgtattaggattgctttggggagagcactttttatgaatccaacgatccttttgcttgatgagcccacaaaccatctagatcttgaggcttgtgtctggttggaagagacactgaagaaatttgaccgcatacttgttgtcatatcacactctcaagattttctaaatggagtgtgcactaacattatccatatgcaaagcaagaagctcaagttatacactggtaactacgatcagtttgtccaaacttgctttgagctctaagagaatcaaatgaagctagtcaaatgggagcaggaacagattgctttaatgaaagagtacattgctcgctttggtcatgtnntttcaaagct

SEQ ID NO: 29295 - DNA, 413 bp, Zea mays
  Clone ID: LIB3180-044-P2-M2-D1
aatcactcttcctctactcccgccgcccaggtgctctcttctctcggcggcgcgaccacggcgatcaagcgcgatacgggcgtaaccgaagaatcgacaatgggcggcgagaaggaaacctttgatacgtccgacctcaacgcctccctccccgcggccgctgcagccctcatcgccgaggaccgcgccggccttgtcaatgcccttaaggataagctgcagagcctggcgggccagcacgcctaagtgttagagacgctgtcgcccaatgttaagaagcgggttgaggtttttgagagagaaccaaaggcaacactaagaaattggggcctaggtttttgataactaaccgacctagaggtaaattacctaaagctctattacctatatacaccaatggtttggaattttat

SEQ ID NO: 29296 - DNA, 256 bp, Zea mays
  Clone ID: LIB3180-044-P2-M2-D11
tcggtcttcacccccttcaagtaaggaagaggaggagggcaagatgtcgcagcggaagttccagcacccgaggcacggctccctcggcttccttcccaggaagcgctcctcccgccaccggggcaaggggaagtcattccccaaggatgaccccaagaagccttggcattttactggcttccttggcttccaggctggcatgacttacaatggcccggagggtgggaagcccggatcccaacctcattaaaaggga

SEQ ID NO: 29297 - DNA, 357 bp, Zea mays
  Clone ID: LIB3180-044-P2-M2-D12
tcttcgtttctgcggttctgccgtctacgcctccaatttggcctctctcccttgcaagtttaagcttcaccttcaaccatgggtaaggagaagtcccacatcaacattgtggtcattggccacgtcgactctggcaagtcgaccaccaccggccacctgatctacaagcttggaggcattgacaagcgtgtaatagagaggtttgagaaggaggctgctgagatgaacaagcggtccttcaagtatgcttgggtgctcgacaagctcaaggctgagcgtgagaggggtatcaccattgatattgctctgtggaagtttgagaccaccaagtattactgcaccgtcattgatgcccct

SEQ ID NO: 29298 - DNA, 238 bp, Zea mays
  Clone ID: LIB3180-044-P2-M2-D2
tcgataatggtgttagcagaggttctggattggtggcttataaatctgctgaggatgctaaccgagctcttacggagatgaatggcaaaatggttgtaagcaagctttttattgtattctttttcacttcttatagaattcagaaatgcattattactggctcaattttcacaaattctttccgtttcatttggcgccttcagtaggtccttgattgctcaatttgttaatctgtttt

SEQ ID NO: 29299 - DNA, 442 bp, Zea mays
  Clone ID: LIB3180-044-P2-M2-D3
tcggaccaacccgtttgttaggaaaaataagcctaagcagggggggccggcccagccgggccacaggggcaggtcaagagagaccccagacatggcggcagcaggggatcagcaccttcaggacggcgccgctgggttgctgcaccctaacgacatgttcatcgtgaagaagaagaagcaagagcgcgcgaggagcggcatcgggtccccttccagctcgggccgaggcgccggacctctgtcgccggccaaccctgggcgtccgggcccttgcccctcgcccagaggtgccaggacgccgttccagagggatccaccgccacacccgtctcagcagtcgatgcattccgctgggtctggatggggcagcggcggtgcgcattcggatcatcaagcgggggcaagctcgtcagcacccggcatcggagacatccagtgggcg

SEQ ID NO: 29300 - DNA, 310 bp, Zea mays
  Clone ID: LIB3180-044-P2-M2-D4
ggcatcctacaaaaccaggggagtgctatatacgatgttgcggcaggattgacctctattcaatccctgctgtgtgacccaaacccaaattcttctgccaactctgaagcagccagaatgttcagcgagaacaagcgtgagtacaaccgcaaagttcgtgaggttgtggagcaaaacttgacagctgattaaaactttagagctggacaggcgattaaaactttattggcttcaccagatggtgcagataagcattcacctttcctagggtcctagggctggtttattgacttaaccgttaaaaattccc

SEQ ID NO: 29301 - DNA, 268 bp, Zea mays
  Clone ID: LIB3180-044-P2-M2-E1
tctttttggggagatggctcttctagttgaaggtttgggggtcggtaaagatacacgtattgaagaatacataattggtcccgatgatgaacttgctgatgaagggctggctccagatccagagaagatcaaactatatggaccttaagaaggcctatcttgggttgcccgacctgttcggggacaaagtgcttttggaagcgcgttaggtttcatcttctcgtcatgggagtatggcggctagtcagggtaagtcccttatggatcc

SEQ ID NO: 29302 - DNA, 286 bp, Zea mays
  Clone ID: LIB3180-044-P2-M2-E10
tttatggcatgttctatattaacaaagaggccaggtgttatttttaagtggctcggggcccatggtagtgattgtggtatagtgaatgtgaacatacctactaatggtgctgaaattggtggagcatttggtggagaaaaagcaactggtggtggacgagaagcagggagtgattcctggaagcaatacatgaggagggcgacttgtacaatcaactatgggagcgagctacctctagcccagggaatcaattttggttaatcctgcagaaatgtagcgcgtggat

SEQ ID NO: 29303 - DNA, 338 bp, Zea mays
  unsure at all n locations
  Clone ID: LIB3180-044-P2-M2-E11
tttatgnttttatccatccatccacgntacctgcggccctcttcatctcaaccgcgtggccaatatcaagatcgggatcaatgggttcggcaggatcggaaggctggtggccagggtggccctgcagagtgacgatgtcgagctcgtcgccgtgaacgaccccttcatcagcaccgactacatgacctacatgttcaagtacgacactgtgcacggacagtggaagcaccatgaagtcaaggtgaaggacttcaaaacccttttcttttgtgagaaggaggttgctgtgtttggcttcaggaacccttaggagatcccgtgtggtcggttgattctta

SEQ ID NO: 29304 - DNA, 427 bp, Zea mays
  Clone ID: LIB3180-044-P2-M2-E12
ccggttcttccaacccaggggcagtgatggcgacgaagaggagcgtgggcaccctcggcgaggcggatctgaaggggaagaaggtgttcgtgcgcgccgacctcaacgtcccgctcgacgatgcccagaagatcaccgacgacacccgcatccgcgcctccgtccccaccatcaagttcctcctcgagaagggcgccaaggtcatcctcgccagccacctgggtcgtccaaaaggtgtcaccccaaagtacagcttgaagcctcttgttccacgcttgtctgagctccttggagttgaagtcgtgatggccaatgattgcattggtgaagaagttgagaagttggctgccgctttgccagaaggtggagttctgctcctagagaatgttagattctacaaggaggaagagaagaacgaacctgagtt

SEQ ID NO: 29305 - DNA, 215 bp, Zea mays
  Clone ID: LIB3180-044-P2-M2-E5
tcgatccatttgtcctcgcgtatgccttccgagaggcatctattcgctggggccggccctcccgaagtccccgttcgaaggtgcggaagccggcaggcgagcgatttcattcgacatgaatcccgagtacgactaccttttcaaacttttgcttattggtgattctggtgtaggtaaatcatgcttgcttcttacatttttagacaatttattat

SEQ ID NO: 29306 - DNA, 290 bp, Zea mays
  unsure at all n locations
  Clone ID: LIB3180-044-P2-M2-E6
atcaatatcggcagngcgnagagaggatcgtcggacagaacagcatgaagatgggcgatcgttctcgtcgtgtgcctggctctgtcagctgccagcgcctctgcaatgcagatgccctgcccctgcgcggggctgcagggcttgtacggcgctggcgccggcctgacgacgatgatgggcgccggcgggctgtacccctacgcggagtacctgaggcagccccagtgcaacccgctggcggcggcgccctactacgccgggtgtggtcagacgagcgccatgtaccagcc

SEQ ID NO: 29307 - DNA, 316 bp, Zea mays
  Clone ID: LIB3180-044-P2-M2-E7
ctgcgcgcaccgacttcaagcaaacagtctggtaaaagagcagcaacgaaagcgaaaggtttcaggtgcggttgtgccattatgtgacagagaatgccagttttctccctttttccgctcttgctggagtgttgtatcatgtttgaggcgctttctccttttatttccttttcaagtattgtgggtaagcttatgtatacaatcactcattttggtgcatgcgtgcaatcaaactatccagagcatccaatctagatccaacggtttcatttgtttgttgttaatatcataatttgcttttatattttttctttta

SEQ ID NO: 29308 - DNA, 126 bp, Zea mays
  Clone ID: LIB3180-044-P2-M2-E9
aatgcgacccactcatacgtatatccacccgaaccaaaccatccgtgggtgttttctacaaacgagggcgtcgcaacaaaaatacctatatcaataacgccaccaaagattccccaaataccccaa

SEQ ID NO: 29309 - DNA, 290 bp, Zea mays
  unsure at all n locations
  Clone ID: LIB3180-044-P2-M2-F1
acgtaccttctgtcctcctgggtatataagcggcggcagttnttcgcgattcagatgggcaacaacaaccacacattgtccctcccgacaccagccacaatcgttgccagcgaccttttccccgattgtacctgcactggttagagttggagaagaccaacccccaccgtcttaagacccggttccattcccgagagttaacatgtttggaaggcgttcttcaagaatcatcatactcttatcaaaaagtgcatcaatcaatccttctactaaagctgatgatccaaaaa

SEQ ID NO: 29310 - DNA, 301 bp, Zea mays
  Clone ID: LIB3180-044-P2-M2-F10
ttttgtcaaatcgccaaatcctgcaggcaccaccgctcgttttcctgtgcggggaacaggagagaaggggagagaccgagagagggggaggcgcggcgtccgccggatctgctccgacccccgacgcagcctgtcacgccgtcctcactctcagccagcgaaaatgggtgccggaggcaggatgaccgagaaggagcgggaggagcaggagcaggagcaggtcgcccgtgctaccggcggtggcgcggcagtgcagcggtcgccggtggagaaacccgcgttcacgttggggcagatcaag

SEQ ID NO: 29311 - DNA, 274 bp, Zea mays
  Clone ID: LIB3180-044-P2-M2-F11
tattttttgtcagctcctgcattcattctgggcaattcaatatataggtcgtgaaccacaaaaacatcaaagagaccggtacctcgaaagcctcctcttgcatcgatgcctattgaattcggtccgaatatgtgcgcttcgtcctaaaccccataccaccaaacacgctgcccaactctgaggcatccacccaatgactaaatggcgcatttcctgcatctactctccggacgacctctttccttcgatgaggcatctgtaccctttgtcaacc

SEQ ID NO: 29312 - DNA, 364 bp, Zea mays
  Clone ID: LIB3180-044-P2-M2-F12
ctcgtagagagaaggaaaaatatccccaaaccctagctcccgatctcgatggcgaaccctcgcgtcttcttcgacatgaccgtcggcggcgccccggcgggccggatcgtgatggagctgtacgccaacgaggtgcccaagaccgcggagaacttccgcgcgctgtgcacgggcgagaagggcgtgggcaagtccgggaagccgctccactacaagggctccaccttccaccgcgtcatcccgagtcatgtgcagggcgggacttacccgcggaacggaccgggggagtcattaggcagagtcccgcagagtcggccagccacgcccgtggttcatgcacgcgccacacacgtcagttattgac

SEQ ID NO: 29313 - DNA, 376 bp, Zea mays
  unsure at all n locations
  Clone ID: LIB3180-044-P2-M2-F3
caaggcgaaggagtcaacacctcaagaccttagaagctgtgttgaaggcctacaatacatgcggaagaaccaacctgagaggcgcatgttttctgcatgcaccagattaatttggtatgcgccccacagcgcatcagaacaagcgtcgcggtggctattagcgctgggctcctagcagtggcattaagcgccactagactaatccggtgtgtgctgaggaaggagcgtcngaacatacgttgctcactagagagattctagagaagaaaaaagggctcctgattaatcctgtgatggccatcaaacactcccaagcgctctagcaaccacaagtggtacagggcaggttcaacacgaaacgacaattaagcaaacc

SEQ ID NO: 29314 - DNA, 437 bp, Zea mays
  Clone ID: LIB3180-044-P2-M2-F4
tctctgtgtcttcagaccattagctttatctactccagagcgcagaagaacccgatcgacaccatgagggtgttgctcgttgccctcgctctcctggctctcgctgcgagcgccacctccacgcatacaagcggcggctgcggctgccagccaccgccgccggttcatctaccgccgccggtgcatctgccacctccggttcacctgccacctccggtgcatctcccaccgccggtccacctgccgccgccggtccacctgccaccgccggtccatgtgccgccgccggttcatctgccgccgccaccatgccactaccctactcaaccgccccggcctcagcctcatccccagccacacccatgcccgtgccaacagccgcatccaagcccgtgccagctgcagggaacctgcggcgttggcagcaccccgatcct

SEQ ID NO: 29315 - DNA, 127 bp, Zea mays
  Clone ID: LIB3180-044-P2-M2-F5
taatttaccgcctatcagcggccactcctggtgctcatcgcagacgtgtgtgacggcctcaacaacacgcgaaaccaaccccgtccccattctgacctcaactagccaccatggcttcttcgaagag

SEQ ID NO: 29316 - DNA, 406 bp, Zea mays
  Clone ID: LIB3180-044-P2-M2-F6
tcttccacgcgtccggcgtgccgccggcgccatggccgcgccaccgccgtcgccagaccaaacctactagcagcgcgtcgggggtgcacctgcggccgatctaggagacagggatttcttctcgtcctgtcctgtggattattacgggcctggatttgcttgggagtgagaggagagagcgagtaatagggtgaaggagtcttggggagaagatggctgcggaaatggtgaaggcggcgacgagcgacaagctcaaggagatggactgggcaaagaacatcgaaatctgcgagctcgtggcgcaggatccggggaatgcgaaggatgtgatcaagtctataaagaagtctgtagggagcaagaacaagagcactcaacactttgctgttatgctattggagatgct

SEQ ID NO: 29317 - DNA, 299 bp, Zea mays
  Clone ID: LIB3180-044-P2-M2-F7
ttgtgattgtggatagattgactaaagtggctcactttattcctgtgaagactacttataaaggttctcagctagcagagttatatatggctcggattgtgtgtttacatggagtaccaaagaagatcgtgtctgatcgaggttcacagtttacctcaagattttggagaagctttcatgagaacatgagtacgaagttgaattttagtacggcttatcaccctcagactgatggacagactgaaaggacaaatcaagtattggaagatatattgagagcttgtacccttcagcatggt

SEQ ID NO: 29318 - DNA, 313 bp, Zea mays
  Clone ID: LIB3180-044-P2-M2-F8
actatactatactctaggaagcaaggacaccaccgccatggcagccaagatgcttgcattgttcgctctcctagctctttgtgcaagcgccactagtgcgacccatattccagggcacttgccaccagtcatgccattgggtaccatgaacccatgcatgcagtactgcatgatgcaacaagggcttgccagcttgatggcgtgtccgtccctgatgctgcagcaactgttggccttaccgcttcagacgatgccagtgatgatgccacagatgatgacgcctaacatgatgtcaccattgatgatgcccagc

SEQ ID NO: 29319 - DNA, 277 bp, Zea mays
  Clone ID: LIB3180-044-P2-M2-F9
ttacctgatcttaccactgggcggacgccggggcgcgcctacaccaggtctgggggggtcccttcaacgagcacacacaaaattcagtgggcaatgttgaatgcatagagcaatttctgcgcaaaaagatggcatcagacgagtttatcagccttgacgcaccttgtgaggctcgtgctaaagaagaagggggagaccaacatgttaaagtttccgttcttagtgcataaagaactgttgcatttactgttttacactatgcctgtgttgatgctat

SEQ ID NO: 29320 - DNA, 379 bp, Zea mays
  Clone ID: LIB3180-044-P2-M2-G1
tcgctgggtcccagtgctcttggctctaagatggcggcgccggaaccggaggccaagctggaagccgtaaccccatctcggtcccacgagctgccaccggagtccgaatccgacgcccctgcctccaccggcagccaggagctaaagccgtgggagcagcacgccgcggtgatcaacctcccgcgctacgactaccgcgcatcagggtccctcctcctccgttcgcattccggcttcctcatcacgtgccccatcaagcgtgaaaaaagtgcaaccaaagaagccattcccatccttgaagagtaccatgcaaattgctgtgtttttgaacatgcaaaaccatgtgatgttgaaaatgcatttaagaaaagaaaactgt

SEQ ID NO: 29321 - DNA, 233 bp, Zea mays
  Clone ID: LIB3180-044-P2-M2-G10
tgatattcgctcacctctgctccgcctggccggatctccccacagatctggtggcgatgggcctcgccgccgccgccgccgccgcccgcgcggccctcctcctcctcgccgtatccggggtcctcctcagtcctgcggcggcggagatcaagcaggagtccttcaaggacgactcccgcggctccatcctcttcgagaagttcggcttcggcctccacggcatggtgtctatc

SEQ ID NO: 29322 - DNA, 326 bp, Zea mays
  Clone ID: LIB3180-044-P2-M2-G11
tgtcccgtctggtgctctggtatcgtctccccccggcagggaaggagtagaaggaaggagagtacgtaggaggaggaggggagaatgcgtgtcggcggcgggcgggacgacgacgacgaggtgtcccggaagctcaagagcatggacgtggacaagctggagaacggcggcagggaggagagcccgcggcccgccgtcaagtaccacggctggaaggccatgccgttcatcatcgggaacgagacgttcgagaagctggggacgctaggcacgtcggcgaacctgctggtgtacctgacgcaggtgttccacatgcggagcgtgga

SEQ ID NO: 29323 - DNA, 238 bp, Zea mays
  Clone ID: LIB3180-044-P2-M2-G12
ttctaatttttcgactagagcgcaagcatcggggccctttttcagggaagggggggggcgcaaaaacattacgaacgacgaggaggtcagaatgcctgtcctctgcctgcgggacgactactacgaggtgtcccgtaagctcaagaccatgaacaagcacaagctctaaaacggcgtcacgtaagagagcacccgttccgccatcaagtaccacagcttgaaggccatgccgttcatc

SEQ ID NO: 29324 - DNA, 358 bp, Zea mays
  Clone ID: LIB3180-044-P2-M2-G2
tacactttctggcggaggcggcccccaagggccaaattttccagcccacacgagctccacactccaattttttccggcgcaaagggttagggtttgctgtcggcgatgtctgatcggcagccgtctgaggaaccggaggagcaggtggacctggagggggacgacgacggcatggacgacgaccacgcctgttaccgtcgccgcggaagccgggacgactcggaggagcccgaggaggatgactacaatgactagcgccactgtgaggcctactactactcctggatggagccctagcctgcctgaagtaatagcttagattacactttctatggacccatattatatcttttatctt

SEQ ID NO: 29325 - DNA, 120 bp, Zea mays
  Clone ID: LIB3180-044-P2-M2-G3
gtagtgcgtagagaggatcgtcgaacagaacagcatgaagatggtcatcgtgctcgtcgtgtgcccggctctgtcagctgccaacgcctctgcaatgcagatgccctgcccctgcgcggg

SEQ ID NO: 29326 - DNA, 265 bp, Zea mays
  unsure at all n locations
  Clone ID: LIB3180-044-P2-M2-G4
cgaaaaacatctccggtccccaccaccacgttcgctccttctggttggcccgtccccctccgacgcgtcgactcccaagatggataagctcagtggttctgcacgtcttatgattgtatcagatcttgaccatacaatggatgatcatcatgacgaggagaacctgtccttgcttaggtttggtgccctgtgggaatccgcatactgggtggattctctactagccttntcgactggaagatcaccaaccttttacaaggaatta

SEQ ID NO: 29327 - DNA, 359 bp, Zea mays
  unsure at all n locations
  Clone ID: LIB3180-044-P2-M2-G6
cgatctaagatcaagaaaggccacagcnnccaagagaaaccacacagggccgagggggggggagcaaccgacccacatncgcaagcaaaaccacgcccaaggagccgaaaaagagggaaaggaagggaggacagacgacgacgacgacaacaccacgcggaggaggcaccccacgaacctacggccgaaggagacgaagcggacaggccgcacggcggagccacgcaaggccaggaaccgccagacgaagaccaagagacgaggcacactcggaccgaagaagcgcccgatagacacgagaaccggagggcaaaaggacgaaaagcccgaaacccgggacgaaaaaccggggggggacg

SEQ ID NO: 29328 - DNA, 212 bp, Zea mays
  Clone ID: LIB3180-044-P2-M2-G7
atcgataagcctcactgtgagagagggacgcggcctgatctaccggatttgagaggcaacatccatcgctgcgaaattatccatccgcgtccttcatgggcagccgcggaaccggggaaggccggaagcacaagctctgaaaacgtcattaccaacgccaggatgagattgacaaacatgctgatcgcggagcccatccacttcgaccacat

SEQ ID NO: 29329 - DNA, 224 bp, Zea mays
  Clone ID: LIB3180-044-P2-M2-G8
tttctggttctatcccctcagctatggcgacagccgtcacgcccgccttcccggtgcgggactaccttcaccggcggcgggttcggctttacgccaaggcggacccgcattcccagggccgcctattacgcaccgggcgggtacgctatgctccggacgggggcggggctgagggcttgggccctcccgctttcgcgggcggcgaggagcaaaccccccaagag

SEQ ID NO: 29330 - DNA, 263 bp, Zea mays
  unsure at all n locations
  Clone ID: LIB3180-044-P2-M2-G9
acgatcgccatcgccgacccaagcaaaggggcggaacaacaaggaggggggcgggcaccaaaacccactcnaggaggaagacccgaacccccaagcccaacacacacacccaaagcctggcagcaaacacaacacagacgcgcaacccacctaactgccaaacccccaaaaccacccacccacacccaaaacacgccgtgaagcagcacacaccgaaccagcagacgacaaacacacagctgaaaaaccccaaccacagcgaa

SEQ ID NO: 29331 - DNA, 312 bp, Zea mays
  Clone ID: LIB3180-044-P2-M2-H1
ccttgacgaaggaaaaggcagccttctcaccgtcggacccggcgatgcagcggcacgtcgcctccggccggccgtcgggcacggacggctccgacttttcttaccgcatggtcgtcgaatcccggtaccagagggtcgccgagggcagatcccgcctcgcgcgccttatcctcgtgcaggcgctgcacctagtggccggaggcttgcttctattgctgtcgttgtccaagggggcggcggtgaacaagttcgccgtgctgtccatggccgcgggattcctggctatagtggggggggaattagggcgaatgc

SEQ ID NO: 29332 - DNA, 148 bp, Zea mays
  unsure at all n locations
  Clone ID: LIB3180-044-P2-M2-H10
acgggactggctccggacccganacactgggatcgaaacgcccagcaggggcggatcccaacaaanccaagctggggnccaccacgcacccccccccacaggngccaacagcgggggnagagccaaacaacagggacccagccaccca

SEQ ID NO: 29333 - DNA, 415 bp, Zea mays
  Clone ID: LIB3180-044-P2-M2-H12
tctcctgaattgattaagatgataaatttaaccacagttggactggagaaagggcacctgcctgtgatgtcagctgaaggttcaggaggtgtatatttcatgcgagatgcaacaggtcagaagaatattgctgtgtttaagcctattgatgaggaacccatggccaaaaacaacccaaggggtcttcctttgtccactgatggcgaggggatgaagaggggaacaattgtagggggaggtgcattcagggaggttgcagcttatattctcgaccatccagttagtgatagtaaatctggtcacagttttgggttttctggtgtgcctcccaccacattggtccgaacctcgcatagggggaagaacttcaagattggttcactgcagatgttcatggacaacaatggaagcactg

SEQ ID NO: 29334 - DNA, 189 bp, Zea mays
  unsure at all n locations
  Clone ID: LIB3180-044-P2-M2-H2
tcggtaggccttattacgncccgaaccgcatggacgaccccaactacgggcgcatgttcgacaccacnctgcgcgacagggagcagtctccgggcgccaccatgacgaccgcccagaagctcgtcggcgcgcgccagctggcccgcctcggcgtcgacatcatcgaggccgggttcccggccttcttcc

SEQ ID NO: 29335 - DNA, 422 bp, Zea mays
  Clone ID: LIB3180-044-P2-M2-H6
tctattgtacaggcgtcttcgtactcgcctatctccgcgacccaaagcgttcccgcttctcccattcttctctcatttctcaccaccgccgccgctaccccctttcgacaacaccatgagggagtgcatctcgatccacatcggccaggccggtatccaggtcggaaacgcgtgctgggagctgtactgcctcgagcatggcattcaggctgatggtcagatgcccggtgacaagaccattgggggaggtgatgatgctttcaacaccttcttcagtgagactggcgctgggaagcacgtcccccgtgctgtttttgttgaccttgagcccactgtcatcgatgaggtgaggactggcacctatcgccagctcttccatcctgagcagctcatcagtggcaaggaggatgcagccaacaact

SEQ ID NO: 29336 - DNA, 286 bp, Zea mays
  Clone ID: LIB3180-044-P2-M2-H7
ttttgagctcctgtacagccaaaccgagaacacggagcacaagttcgttctgaacgacaggaacaagccaatcatcttctccatggctcgtctcgaccgtgtgaagaacttgactgggctggtggagctgtacggccggaacaagcggctgcaggagctggtgaaccctgtggtcgtctgcggcgaccatggcaacccttccaaggacaaggaggagcaggccgagttcaagaagatgtttgacctcatcgagcagtacaacctgaacgggcacattcgctggatc

SEQ ID NO: 29337 - DNA, 194 bp, Zea mays
  Clone ID: LIB3180-044-P2-M2-H8
tgctgcgctttctgctttccgagcgaccgtgccgggtttcttctatagcagggcgcaggcgcaacaaattccacccgttccttcgggtggccggacggaacgaggaaggaggcaggatggcctccgatggccacccgccggagccggggaagaaggaggatgttggcaccacaggcctctggccttgaacaaac

SEQ ID NO: 29338 - DNA, 222 bp, Zea mays
  Clone ID: LIB3180-044-P2-M2-H9
ttctgtctaccttttccccaactccctctcgggtattttcctccgcaggcgggggcccctcatcattatccccttaccaccgactaatcttccccagctgagttaatccccgactggtccaatgcgtagatattttttctctcctaaacccccacggggttacccctattcaaagtgctcaacgaggggaaactttccaaggtctaagatctattgaaggag

SEQ ID NO: 29339 - DNA, 276 bp, Zea mays
  Clone ID: LIB3180-045-P2-M2-A10
tttattccccccgccccaacttgtcaggactcaagaggctcccctcctcgctcgccgcggaacacgcgcgccgtcgtcgccagcccgggttcatttctccgttccttggtgcggtggtagccgagcgctccggccatggcgttctatcggggcctcaccgcagtctcgagactgcgatcacgcatggcgcaggaggccaccacgctggggggtgtgtggtggctttcgtttcatttctcgtttcttctttcttttattttctagcttgcttcaatt

SEQ ID NO: 29340 - DNA, 394 bp, Zea mays
  Clone ID: LIB3180-045-P2-M2-A11
gcttcttcataacaaaaacctcagtggaactgggcaaaaaatccccgtgcccagccacatcttacagggccacaccataacctgggccagcaaccactactactaccccaggtaggattgcactgttaccctaagctggcgctctgccactactttttgtgagaggcaccacgagttttttttgggtgcaagttgggccggctggctggtaccaatacttggtaacaacacactactagtgtgtttgcttcagtctcaactatgtgtgtatagaatgtatcaagttcatatagtacaagactctttacatatttcaacatgaagcaacaaagacaagaagtctgtttcttccttacacaatttttgggcctaaccagccttggtacttcttttg

SEQ ID NO: 29341 - DNA, 164 bp, Zea mays
  Clone ID: LIB3180-045-P2-M2-A12
tttcttggacgcgagggcggaaatgagagcgggggggacgacaaggaaaaaggggggcgacaaactatctacaacgagcttttagcagcacccgaggagcacccagagttgcacacagaggctcccttgaacccaaaggccaacacggagaaaacgaccccaac

SEQ ID NO: 29342 - DNA, 207 bp, Zea mays
  Clone ID: LIB3180-045-P2-M2-A3
ttttttgtttcaagtactacaaatgaccaaaacagctgcaatgacaagaactacgaagaaccaccaccaaaaagggttgctcgtcacagacgcaagggaattccccaacgtgcgccattcttctaatctgaacatcatgacaatgtccagtaaatgttgtgggaaataagaagagataatatttgtcatgggtgaaatgaatgaatg

SEQ ID NO: 29343 - DNA, 212 bp, Zea mays
  Clone ID: LIB3180-045-P2-M2-A4
attcctcacgcgctgtttgaagaggagcttgaagccatgaagaaaggcaaggggattaagaacgacacctacctcaccggcaccgttctcaaagagctggtgagccagtacaaggacgtctacgtggaggctaagggagagccattctcctcataccccaagaggcatctggagtttgcagtgctgtccgtgttcgactcctgggagagccc

SEQ ID NO: 29344 - DNA, 358 bp, Zea mays
  Clone ID: LIB3180-045-P2-M2-A6
tctttcgtagagagaaggaaaaatatccccaaaccctagcttccgatctcgatggggaacccttgcgttttctttgacatggcccgcgggggggcccccgggggcccgatcgtgatggagctttaccccaaccaggtgcccaagacccgggagaactttcgcgcgctgtgcaccggcgagaagggcgtgggcaagttcgggaaggcgctccactacaagggctccacctttcaccgcgttattcccgagtttatgggccagggcggggacttcacccgcggcaacggcaccggcggcgagttcatctacggcgagaagttccccgacgagaagttcgtgcgcaagcacaccgcccccg

SEQ ID NO: 29345 - DNA, 334 bp, Zea mays
  Clone ID: LIB3180-045-P2-M2-A7
tcttctggctcttaacaaattcctacagaaggcaatttttctgtttcataatcaactgggtctgatatgtctcataccaactaatggccgtgagaatgttatttaggcttatataagttatacagaagatatttcgttatgataatgcacaaaagttatggtgtgcaatgaaaggtgcaaaatgtgttttccaccctggataggggtcgtggatttctaagtcttgaggaggtgtaccaggcattaatcaaacttggttttttcgttggattcaccagccttttatactgtttgtgagagctttgacaaagagcaagaagggcatgattcaatt

SEQ ID NO: 29346 - DNA, 355 bp, Zea mays
  Clone ID: LIB3180-045-P2-M2-A8
tctatcgatctcgtttcaaatccatccatcctcgtttcctccgtcccgcagcagtctcaaccccatggccaagatcaagatcgggatcaatgggttcggcaggatcggaaggctggtggccagggtggccctgcagagtgacgatgtcgagctcgtcgccgtgaacgaccccttcatcagcaccgactacatgacctacatgttcaagtacgacactgtgcacggacagtggaagcaccatgaagtcaaggtgaaggactccaaaacccttctctttggtgagaaggaggttgctgtgtttggctgcaggaaccctgaggaggacccgtggggtttcggtggtgctgaaattgtt

SEQ ID NO: 29347 - DNA, 413 bp, Zea mays
  Clone ID: LIB3180-045-P2-M2-A9
tcgctagttctagatcgcgagcggccgcgccttttttttttttttttaaaggcggaactatataatgatgcaaatattattggtcataccacacatgataatgaaagttaaaataaatgtaaatatacatatatatatagatatataaagaatatagaaaataaaaaaaatataaaatattttaaaatttttactaaatattaatatattattataatttttgtaataattcctaatgaacaagttttaaatatcctatataattataaaaaaaatatatttacaatttaaaaacatttaatatttaatatattatgcaaaaaataaattaattattttattaacttaaaatataaataaaattaacttatgataaatataatataatattatatttataaatatattataaa

SEQ ID NO: 29348 - DNA, 391 bp, Zea mays
  Clone ID: LIB3180-045-P2-M2-B1
tggactgcttgctccctgttgaccattgggtattctgaaccatcgagccatggctgccaagctgactcgcctccacagtcttcgcgaacgccttggtgccaccttctcctcccatcccaatgaactgatagcactcttttccaggtatgttcaccagggcaagggaatgcttcagcgccatcagctgcttgcggagtttgatgccctgtttgatagtgacaaggagaagtatgcaccctttgaagacattcttcgtgctgctcaggaagcaattgtgctccccccatgggttgcacttgctatcaggccaaggcctggtgtctgggattacattcgggtgaatgtaagtgagctggctgtggaggagctgagtgtttctgagtacttggca

SEQ ID NO: 29349 - DNA, 353 bp, Zea mays
  Clone ID: LIB3180-045-P2-M2-B11
gacggagagagctctcagcttctctcgacctaagtaagctaggtggacaacgcctgcaggctgcggcaccaacgcggccttcgccgcgaccccctccccatctccctcctccctaccatgcgcgagggcgaggcccacgcccacgccctcccgtcgaaaacccagctactcccgtgcctcaaagatgacgagccgcgacaaggtggggtgctcctcgatcccgctgcccctcgaccgtgtccttgccgcgctggtcgccagcacccagcaactcgggagggggtgggaggcggccttccgcgttcgatgcgggaaggcagctggagcggcggtcggtgaggcggaggggaaag

SEQ ID NO: 29350 - DNA, 381 bp, Zea mays
  Clone ID: LIB3180-045-P2-M2-B12
tctcatctccacctctcctccggctagggtgttcacgcctgccgcggcgaaggttctgccctccccggcgtcgggctctggtcgtcgtcggccgggaagatggctggcggcttcagggtacttcatctggtcaggccctttctggctttcttgccagaggtgcagagcgcggataggaagataccattcagagaaaaagttatctacactgttatttctctcttcatttttctggtgtgcagccagctcccactctatggcattcattcgacgactggagctgatcctttctactggatgcgtgttatccttgcattaaaccgcggcactgtgatggaggtgggtattactccaaatgtgacctttgggttggtaatgcaa

SEQ ID NO: 29351 - DNA, 164 bp, Zea mays
  Clone ID: LIB3180-045-P2-M2-B2
tctcgttcacaccgttcctccgagcccaggagcagccccgcgccaggaggaagtttgtgtcttttaacaatatgtcgagggaggagaatgtttacatggccaagttggcttagcaggcttaaaggtattaggagatgggtgaggatattgagaagggggctaat

SEQ ID NO: 29352 - DNA, 104 bp, Zea mays
  Clone ID: LIB3180-045-P2-M2-B3
tcattatacctaaccttcaagacctccccggtggtccttttaaaaaaaaagttcgtctttaaaaacattttattctttcttttctttttaatttcttttttctt

SEQ ID NO: 29353 - DNA, 137 bp, Zea mays
  Clone ID: LIB3180-045-P2-M2-B5
tgtttggcgtccgttcggttacggttcttgatccggctagggaccgccggtggcgaaggcaatgcagccggacccgcatggcccgggcagggggaaggcggtctgtgccaatgcgcacccgcggctgtcttcgccgg

SEQ ID NO: 29354 - DNA, 286 bp, Zea mays
  Clone ID: LIB3180-045-P2-M2-B7
tcttttgtgggtcttcagaccattagctttatctactccagagcgcagaagaacccgatcgacaccatgagggtgttgctcgttgccctcgctctcctggctctcgctgcgagcgccacctccacgcatacaagcggcggctgcggctgccagccaccgccgccggttcatttaccgccgccggtgcatttgccaccttcggttcacctgccacctccggtgcattttctaccgccggtccacctgccgtcgtctgtccacctgccaccgccggtccatgttgccg

SEQ ID NO: 29355 - DNA, 395 bp, Zea mays
  Clone ID: LIB3180-045-P2-M2-B9
tttctgtcccctctagccgccgcctaccgctcgcgctctcctcgcgttcgggaaggtcgtttcgccatggcctcggagacggagacgttcgccttccaggcggagatcaaccagctgctctcgctcatcatcaacaccttctccaagaacctcaagcttggcatccacgaggactccacgaacaggaccaagattgctgagctcctgaggtaccactcgaccaagagcggggatgagctgaccagcctcaaggattatgtgaccaggatgaaggagggccagaacgacatcttctacatcactggtgagagcaagaaggctgtggagaactccccgttccttgagaagctgaagaagaggggctatgaggtgctgttcatgggggatgccattga

SEQ ID NO: 29356 - DNA, 393 bp, Zea mays
  Clone ID: LIB3180-045-P2-M2-C1
tctctcgtagagagaaggaaaaatatccccaaaccctagctcccgatctcgatggcgaaccctcgcgtcttcttcgacatgaccgtcggcggcgccccggcgggccggatcgtgatggagctgtacgccaacgaggtgcccaagaccgcggagaacttccgcgcgctgtgcacgggcgagaagggcgtgggcaagtccgggaagccgctccactacaagggctccaccttccaccgcgtcatccccgagttcatgtgccagggcggcgacttcacccgcggcaacggcaccggcggcgagtccatctacggcgagaagttccccgacgagaagttcgtgcgcaagcacaccgcccccggtgtgctctccatggccaacgccgggcccaacacc

SEQ ID NO: 29357 - DNA, 396 bp, Zea mays
  Clone ID: LIB3180-045-P2-M2-C11
attatttgttacccattgtactgataccaatggtggggttcattgtgctcgtcaaattgtaactatttccaatggtgaggaaaaattagtatttatgcaaattgaagtgccttgcgtaacttttgaatcaatcttcattgatttcatttccagaattttctgtatcaaaagtttagtaatgtgttgctttgttaaaaacatgctttaatgtggaatgacagatgcgagggagtggcacatcaactgctgagtctggctcaaaagaagttgatgatgctgtctccgtacaagctctcagaagttacacatcacatcctaagttgacccgagttcgtgaagagtgctacaaggttttctactcgtctcactgaatatgtacctgttgtctacaaggct

SEQ ID NO: 29358 - DNA, 350 bp, Zea mays
  Clone ID: LIB3180-045-P2-M2-C12
tggcgccgccgtctcccgctcccctggcacgcattcggggtccttgcgggcgacaagcacctccgtcccggaggcatctgccgctgcagcatagaccaccatgtcctcgctcggcagcaccgatgttgacgatggcaacgaggaggaggacggctccgcgagcacccccgagatctactgctgccactcccacgcagttcttgctcacgagatctgtgtgcaggttgatgtcctcgtggtgccacgccgacctcgccgccaccaagcgcgccacccatgtcctcaccgacctcgccaaaattggacggatcgaagcaccataataagtgtttagctttcctccgcgcctc

SEQ ID NO: 29359 - DNA, 395 bp, Zea mays
  unsure at all n locations
  Clone ID: LIB3180-045-P2-M2-C2
tttatttcctcattagtgtttgggtctaggccaaagtagatgacaacacgtatagctccgggtgcatgttcgtccgaaggcctcggggtctcattcaaatccatatctactggatcaaagaatgttacatctggccgctcttgttctattactgcaattgcatcattaatttccttgccaatcaactcgggccaactggtcttgttctgcgtagccatgatcacgtactgtccttagcttctctctcttttgaaactgttataataccaataagaatcaataattgagcaacgttagtgtaacgaatagaaacataatatgttgntttgtgctaatgctatcatactttcatagtaagcatgtcttaatcgaatgcactacataactaccgggat

SEQ ID NO: 29360 - DNA, 360 bp, Zea mays
  Clone ID: LIB3180-045-P2-M2-C3
tcttttgagcgccggcccttctccgacgtggcgcctcagtatttgttagggtttgctgcgggattgaaggcactgctgcaggctgaaacgtttctcgcttgattggcggaagaagggattccagcgatctgtttgctgctagctgcgagagttcaatatgtctcggaccttcaaatcgacgacgggtctctctcggcggtttctgaatctgatcgcggtcaaccactcccctggcgtcaagtcgctgcaccgcatcggcctgggtcgtatctttaactcaacgccagggccaataccaaacggagatcgattggagttcgcagtaggtcaagaagacttcatggtgcggtcccgcgcgtt

SEQ ID NO: 29361 - DNA, 400 bp, Zea mays
  Clone ID: LIB3180-045-P2-M2-C4
cgagaggaaggaggacgacccgcgcctgtggaggaggtgggattccgacgagcgctacatcttctccatgaacgccgctcacagcatccggaacacgtccagcatcagctacgtgtcgcgcgacggcgccgactcggtccccgcgccgctgcggctgtacgagacggccagggtgacggaggagaccttcgtggtggacaggaagttcaacgtgtcctggcggttcggcgtggaccccggattcgagtacctggtcaggctgcacttctgcgagctggagtacgggagcgcggagcagcgcaggttcaagatctacatcaacggcaagaccgccgcggagaactacgacgtggtcgccaaggccggtggcaagaacaaggcgttccacgaggacttcctt

SEQ ID NO: 29362 - DNA, 202 bp, Zea mays
  Clone ID: LIB3180-045-P2-M2-C6
tcgtccgtatgccgggctgggtggcgccgagatcttctagaagaggaaggcggggctcgacccgtctctcttccattactaccagaagccgctcaacattgtggaggggaagattcagtacctgtatgacatgcatggaaagagatatctttattgcattgggagcttcccgacagttacttgtgtccaccttctgttaaaa

SEQ ID NO: 29363 - DNA, 366 bp, Zea mays
  unsure at all n locations
  Clone ID: LIB3180-045-P2-M2-C7
gtccaaaccaccgcaccgacaccgactccgagccccgccgcgccgcgctacctccgctcctctcttcgcccctgccggcgtcgaggccgaagcgaaggcgagcatgcatcacgaccccaaccccttcgacgagggcagcgccgaggacaaccccttctcaaatggaggagccggaggcggcaagcagcagtacggcttccggccgactgagcccgtcgggttcggcggcgctagcaggggcgacgccgtcgatgacgtcccgctcgagaccatgggggactctcggagcaaggtgaaggagctctcgacgtgggaatcagatctgaagcggcnagaggcggatatcaagaagggggaagaggccct

SEQ ID NO: 29364 - DNA, 394 bp, Zea mays
  Clone ID: LIB3180-045-P2-M2-C8
gtgctgtgatgccatctccatatgagatgggagggatggcaatgagagatgctggtgtctcacaacctgttccaattggggcactagccactgcgcttgctaacgcctcaccagatcagcaaagactgatgcttggtgagaacctgtatcctcttgttgaacagctggagcgtgagcaggctgccaaggtcactggcatgcttttggagatggaccagacggaggttcttcacctgctggagtcgccagatgctctcaaggctaaggttgctgaagccatcgaggttctccgctcagcccagcatctccagcagagcaatgcctccaccgagcagcagctggctaatctatcactgaatgatggcgtcctctccagctgaatgtttctgatgat

SEQ ID NO: 29365 - DNA, 89 bp, Zea mays
  Clone ID: LIB3180-045-P2-M2-C9
ttctttctagatcgcgagcggccgacctttggtggtttttttggaattggggggggttttttttttatatactgatctttttgggttaa

SEQ ID NO: 29366 - DNA, 395 bp, Zea mays
  Clone ID: LIB3180-045-P2-M2-D10
tcttaggttccgctccccaatttcccctcattttcctggggctgctgcgccgcgcttcctctcttctcgccttctccctcttcgtggcgatccgggttccgctgcaacggcccctgtcgactgtcgtcttctcttctccctcacggcgctcgatccctccggattgccgcgtagcgggatcagtgattcagctggttgaacagaaactagtaaagatggcatcagaagggaacaaagatgtgcctaatgaagctttgtcccgggatcttgcatcgttttctgggccaaacgcaagccgtgccgcccagggaattatagtatcctgcatatgaactaccacagaagggtcattcccttcagagcgccccggctctttactgcttacaagatggctc

SEQ ID NO: 29367 - DNA, 365 bp, Zea mays
  Clone ID: LIB3180-045-P2-M2-D11
attagcaacatagaaagcacaatagtgtaccaacaatggcagccaaaatattttgcctccttatgctccttggtatttctgcaagtgctgctacggcgaccatttttccgcaatgctcacaagctcctatagcttcccttcttcccccgtacctctcaccagcggtgtcttcggtatgtgaaaacccaattctttaaccctacaggatccaacaggcaatcgcagctggcatcttacctatatcacccttgttcctccaacaatcatcagccctattacagcagatacctttggtgcatttattggtacaaaacatcagggctcaacaactacaacaacttgtgctagctatccttgctttctac

SEQ ID NO: 29368 - DNA, 123 bp, Zea mays
  Clone ID: LIB3180-045-P2-M2-D2
tacgttactacccgcagaatataaacatatcgggcatcttaggagaagggggggactataataaccctattaacgtctagcgaaccgttagcagcccatcttgagaatcggacgtatttttat

SEQ ID NO: 29369 - DNA, 307 bp, Zea mays
  Clone ID: LIB3180-045-P2-M2-D8
tttctcagcttaataagaagaagagatttgccggacatattgtggcaggttatgcttgtcaagtgaacttctcacctgatgggaggtttgtgatgtctggtgatggtgagggtagctgctggttctgggactggaaaagctgcaggagatttaagactttgaggtgccacaacggagtttgcattggatgtgagtggcatccattggaaactagcaaggttgcaacctgtggatgggatggtgtaactaaatactgtgattgaagtttgtcatattgatcgctttgtcatccatttgctagcttttt

SEQ ID NO: 29370 - DNA, 397 bp, Zea mays
  unsure at all n locations
  Clone ID: LIB3180-045-P2-M2-D9
tctgcgaagagtgctgttagttgatggatcattgcataacaagctgttcccttgtacaacttcattgcatcaagagcttatttgttttgatcttccatcgttacattcaactttcttggatttgctgaatgcaactattaaaggcatgcgaagccaactcttacctcatggtgctagtatcatacggcttataacagagtacttcaaaatagcaaagctgcctactttgaggacaaaaacttatagcattttgcagctgatgctgacctccatgggtgttnnnacaaancttcactctgtttttggtaatattctttttattcatttttttgatctttaataaatatttgattaattttttctaaatttttttatttattttatattattttctgta

SEQ ID NO: 29371 - DNA, 396 bp, Zea mays
  Clone ID: LIB3180-045-P2-M2-E1
ctgaggatgtttccagtgaaataatgaaagaaatgcaggccaagcctgaccttatcattggcaactacagcgatggcaacctagtcgccactctgctcgcgcacaagttgggagtcactcagtgtaccatcgctcatgccttggagaaaaccaaataccccaactcggacatctacttggacaaattcgacagccagtaccacttctcttgccagttcacagctgaccttattgccatgaaccacaccgatttcatcatcaccagcacattccaagaaatcgcgggaagcaaggacaccgtggggcagtacgagtcccacatcgcgttcactcttcctgggctctaccgtgtcgtccatggcatcgatgttttcgatcccaagttcaacattgtct

SEQ ID NO: 29372 - DNA, 209 bp, Zea mays
  Clone ID: LIB3180-045-P2-M2-E11
tgttgtaccattcccctccatggtacctccgcgtgacattcagagatgcgcggcagatcctaatccacaatctggcctagcttaccaaacctctatgactttctgccaacaggcattcattgtttaccatcattcctaaaaattttatgcacccttagctaaagctctagctctttttgctacgaaatctgacttcttcttgttatccg

SEQ ID NO: 29373 - DNA, 285 bp, Zea mays
  Clone ID: LIB3180-045-P2-M2-E12
ttctgatacacgccgcgcatcgcaagcgagcgacacataaagagcgcccatggggtgtgcaccaccatctcgcccgccttcaatcccctccatcattcgctccaacagccccgctttctccaccatcagtgcgaaaaattttatgcgcgctttgggaaagcgcgagctcgttttgctttgaagctgcctccgcctttttatccgtccggggctgtgtgggctccgcctccgtgtactccggccgggcgtggtcaccgagggagcagcggcgagaggggggggggg

SEQ ID NO: 29374 - DNA, 117 bp, Zea mays
  Clone ID: LIB3180-045-P2-M2-E2
tctcttttgtgcgtcagaggcagaggcagagaggcagatgcagaggcagtcatggggagcctcctatatcgccgcgtgatccactttgccaacctcctcgtgaaggtcatgctgccc

SEQ ID NO: 29375 - DNA, 175 bp, Zea mays
  Clone ID: LIB3180-045-P2-M2-E3
tcttgtttgtgatagaatccaaagacgcaagcggctgcaggcagcagcgccgcgcaggcgttgtggcctgtgggagaggaaaaagagaaagaggaaccggccaagacaagcaagcgagaggccagggccgcggtgttgcgtcagatggggaagcacatgcgcaagtgcaggggcg

SEQ ID NO: 29376 - DNA, 341 bp, Zea mays
  Clone ID: LIB3180-045-P2-M2-E5
ctccgtttttttaattattcctccttacaccccggctttttaatatatcaaatatagccattccaaaacctcttctacctcctctaccactacccttatctatttttttattctttttcctctccctccttatctttttctaccattatattattcctctgcatttatttttctcttattcttattttttattctttttttaataataccttttattttatatttttttctttattttttttttttattattttaatttatattcttctttattatcttttttctttactttattatttattatactattctttattttatatttcccttttttttccctt

SEQ ID NO: 29377 - DNA, 368 bp, Zea mays
  Clone ID: LIB3180-045-P2-M2-E6
tcttttttacaagagaagtgctgctttggcttaccaagaaaagaggtgtctcaggtgggtgattcaacagctagctctcgattttggggcaatcaagaggtgaaattgcgaagaacatgagtaccacaactgccaagggaaaaggagcacctcaaaatgcaaatgatgcaccactcgatgttcagcccttaacaatagcgtatccgggggaaccagtggtctgcacaccaagacccatcgtgtcgcatcctgcatataatggtggatggaaggttctccgccacatcaggccaaatggaagatctgatttcggagcggcgaccgacaggccggttcatctagctgtgtgcgctactcgcctgtgctgt

SEQ ID NO: 29378 - DNA, 87 bp, Zea mays
  Clone ID: LIB3180-045-P2-M2-E7
tctcgcctagcccgacttgcgccttcccagcaagagcccactactttccgggatcgccgaaaccaacttcaaaatatcaatctaaaa

SEQ ID NO: 29379 - DNA, 364 bp, Zea mays
  Clone ID: LIB3180-045-P2-M2-E9
tttcgttatcggcctccctcccccaagatcctccactcgatcccaaacaaacggaggaatccatccatcgcacatggacgcgttcttctcggcctcctccgcgtcggcgccctacggctacggcgccggcggatggagctacgactcgctcaagaacttccgccagatcacccccgccgtccagacccacctcaagctcgtctacctcaccctgtgcgcggcgctggcctcgtcggcggtgggcgcttacctgcacgtggtctggaacatcggcggtacgctgacaatgctcggttgcgtttgcagtatcgcctggctcttcttggtgcccgtctactaggagaggttgaggtttggactgttt

SEQ ID NO: 29380 - DNA, 404 bp, Zea mays
  Clone ID: LIB3180-045-P2-M2-F1
tactagtcacgataggaggaagactggaagaggaggcgagcacgtttgcggtgcccaccctcaccgtccactccaaaaccccaaatccagttccgttccaatcgccgagaagggcagcaaaggggagaaaaaaaaggaaaacgatggcggcggccggcggcgagaacagcggcgcgggcgagggcgagggcgagttttacctgcgctactacgtgggtcacaagggcaagttcgggcacgagttcctcgagttcgagttccgccccgacggcaagctccgctacgccaacaactccaactacaagaacgacaccatgatccgcaaggaggtcttcgtctcgccctccgtcctccgcgaggccaggaggatcatccaggagtccgacatcatgaaggaggacgac

SEQ ID NO: 29381 - DNA, 357 bp, Zea mays
  Clone ID: LIB3180-045-P2-M2-F10
tctgtggcgccggcgtgcttgtgatctcaacccaagtcgtgcctccgctccggtcacccgtcgctccacgcaaccatgtctaggaggaagaccagggagcccaaggaggagaacgtcacccttggacccactgtccgtgaaggagagtatgtctttggtgtcgctcacatctttgcatccttcaatgacaccttcattcatattactgaattgtctgggagggaaactctggttcggatcaccggtggcatgaaggtgaaggctgaccgtgatgagtcgtcaccttacgctgctatgcttgctgctcaagacttcgcacagtgctgcatggagcttggcattactgcactgcacatt

SEQ ID NO: 29382 - DNA, 121 bp, Zea mays
  Clone ID: LIB3180-045-P2-M2-F11
tgatctccttccacctttgccgatcgcccgttgccaccggccgggcgatcctggtacttccacttccaccatggcctcctcctcctcttcctcctcctcctcctcctaccttcttcttctt

SEQ ID NO: 29383 - DNA, 370 bp, Zea mays
  Clone ID: LIB3180-045-P2-M2-F12
tctaccttctcctggcagtactactactggtatctcaccaacgatggcattgggcacctacgcaactacctgaacctcccgtctgagatcgtgcctgccacgctcaagaagtctgccaagccacctggccgcccatttggctctggccctcctggtgaccgcccaaggggcccaggccgttttgacggcgacaggccaaggtttggtgacagggatgggtaccgtggtggtcctcgtggtgctcctggtgactttggtggcgataagagtggagctcctgctgagttccagccattattcaggaggcctggctttgggcgtggtggcggcagcggtttctgcgcggtcccaacccttttttccatggagt

SEQ ID NO: 29384 - DNA, 238 bp, Zea mays
  Clone ID: LIB3180-045-P2-M2-F2
ttcgtcccctccgcgtgctctccgcctgcggcatctgtatcccacaacgaaaaactaccaaaaaaattagaaatccccaaatccgcgagatctatcagtatcgagcgatttaccgatccgattgctagggtttagtttcgaaaaagaaactctgaaaaaaaattctggtcgaggggaggagacgatggcagcgcaagtggcggcggtggtggtgccgaatgggagcccggacgctgtc

SEQ ID NO: 29385 - DNA, 401 bp, Zea mays
  Clone ID: LIB3180-045-P2-M2-F3
tctatcttactaccacccatctcgtcgtccgccgattcgatccggttcttccaacccaggggcagtgatggcgacgaagaggagcgtgggcaccctcggcgaggcggatctgaaggggaagaaggtgttcgtgcgcgccgacctcaacgtactgctcgacgatgcccagaagatcaccgacgacacccgcatccgcgcctccgtccccaccatcaagttccttctcgagaagggcgccaaggtcatcctcgccagccacctgggtcgtccaaaaggtgtcaccccaaagtacagcttgaagcctcttgttccacgcttgtctgagctccttggagttgaagtcgtgatggccaatgattgcattggtgaagaagtttagaagttggctgccgttttgccag

SEQ ID NO: 29386 - DNA, 131 bp, Zea mays
  Clone ID: LIB3180-045-P2-M2-F4
tttttattcactatgattgcaagacgcacgaggggtttatctccgacaagactggggagccaataaacttatacaatcacaatcctgaggatctatctttatcaatactgttcaaccgaatctattgctag

SEQ ID NO: 29387 - DNA, 378 bp, Zea mays
  Clone ID: LIB3180-045-P2-M2-F6
cttatgtactacaaatggagacactgaggaatagaatcctcccacctagaaagagcagaagacacaactacaactccaaagctggtagatgactaacagctacaggaggaccaccacaggagcaatgggaataaaatatgatgactttggaaaggagagctggagaaggctgcagggcattacatcttgcataaatttcttgcatacaggacggatctccttgctgagtgttgctgaaaacatcatgacttgcttatcatgaggagtcattttgaagatctcctgaacatctctccgcatgtctgcataatacatatatttgtcaaggatagcaattatactttatactataattaaacatgttgacaatagcagatt

SEQ ID NO: 29388 - DNA, 329 bp, Zea mays
  Clone ID: LIB3180-045-P2-M2-F7
ttttctttatggagcaagtacaggttgttggggttacttgcttgggaatgtatggtgctttattagcacataagaagtttgacacatgtatcatggatgaagctggacaaattacattgccggttttactgggacctttgatgcttgcaacaaagttaggactagtaggagaccattattaactttctccactggttcatagctctgaagctcgagaaaatgttatgggcatcagcttattttgcagattgacataagtacatttccaggcaatttcagtactgctatgcctctaccgtatgatatctggtatcatggagctcttaatt

SEQ ID NO: 29389 - DNA, 321 bp, Zea mays
  Clone ID: LIB3180-045-P2-M2-F8
gtcggttcgcccgcaccgtttcccaaaccctccggactcgaacccaacgcacgcacccacatcgggagacgagccaggccgagctctagaagagtctccggaaggcccgcatcgtcgatggcggccgagggcagcggcgtccaagagacgttcgaggcgcgggtgaagcgcctgttcgggtcccgcctcttcgacgccgtcccggactcctccttcccgacggcctactggtccgtggccgcgggcgacgtcaagcgccaccgttggtcgaagccgttggaggcccgcgacgcggatgaggaggcagctggtggaggccgt

SEQ ID NO: 29390 - DNA, 401 bp, Zea mays
  Clone ID: LIB3180-045-P2-M2-F9
ttcttttagtctgagctcgccgctttagcgagcgcaagcagagcctgccaaaaggcgtagagaaaaaaaaatccgccttctcctcccagtcgcaggccaggctcagcctcccctctcccctcctcggcatcttcgccgccggcgatctatctctctcacaatggcggcgcccatgtcagccatcgactcagcgtggcagctcctgatcgccaacttcaccgagttccagctcgccaccgtcgtcaccttcctgctccacgagaccgtcttcttcctctccggcctcccctccctcctcttcgagcgcttcggactcttcgccaagtacaagatccagaagaagagcaacacctctgcttaccaaaacagatgtgtcttgcgcctcattctctaccatgtat

SEQ ID NO: 29391 - DNA, 313 bp, Zea mays
  Clone ID: LIB3180-045-P2-M2-G1
tcgtgatcacatgttctttgcttcagacgagaggaggaaggctgtcaggcagagggggggggctcccacgcttgagctgaggcagcaggcgctcgaccgtcttttgccgtatcagaggtctgacttcgaaggcattttccgtgctatggatggactcccggataccatccgactcctggaccctcccctccacgagttccttccagaagggaacatcgaggacattgtaagtgaattatgagctgagacgggagccaaccaggaggatgccctcgcgcgaattgaaaagctctcagaagtaaaccccgatgct

SEQ ID NO: 29392 - DNA, 401 bp, Zea mays
  Clone ID: LIB3180-045-P2-M2-G10
tctcgcctcctctccctagtctccacgacgcaagggagagtgacggaaagcgacgcggcgcgagcgaggagggccaaggcgaagaggggaagcaccgcaccaggacccttgttcgccgccgccgcctctgatctccgcgaggttgtcaggattcaatatgtcgaccagcacattcgctacttcctgcacgctgttgggcaatgttagaacaacgcaggcctcccagacagcggtgaagagcccttcgtctctaagcttcttcagccaagttacgaaggttccaagcctgaagacctccaagaaactggatgtctccgccatggctgtatacaaggtgaagcttgtcgggcctgaaggtgaagagcacgagtttgatgctccagacgacgcctacatccttg

SEQ ID NO: 29393 - DNA, 317 bp, Zea mays
  Clone ID: LIB3180-045-P2-M2-G11
tttagcagagcagcgaaaagcatggatgccgaagccgccgccgccgccgagggcgcaggtgcggcactggaccgcggacgtcaacggcatttccctccacgtcgccgagcgcggcgccgccgacgcgccggcggtcctccttatccacggcttcccggagctctggctctcgtggcgccaccagatggccgcgctcgccgcccgtggcttacgagcgctggcccccgacctccgtggctacagcgacttcgtcgtgcccaccttccccgtcgtctacatatattcttcacattgataccttctaggattctgctttt

SEQ ID NO: 29394 - DNA, 355 bp, Zea mays
  unsure at all n locations
  Clone ID: LIB3180-045-P2-M2-G12
cctgagccctgcagnnggatgcggaccgcacanngcgcgaagnngcattannacgcctctnngcccgttacnnccgaaaatactgttggtgtaccactncggcgatccccggcgccgtgagtgtcnnaccatgattnnncagtcagcgaccgcgttgatgcttngctggctgnnaccctgatgaagtnntcgtgtccgtaccaactnnggcgtaatcaatggggcccttcggggcccccattgtttctcttttgtggaggnnagtccattgnnacgaaagggatganancctgattnnggcccgccttttccgcttcgcttggnnngtgaacaannnctgaaccnnngtgatgtc

SEQ ID NO: 29395 - DNA, 225 bp, Zea mays
  unsure at all n locations
  Clone ID: LIB3180-045-P2-M2-G2
ctacnttggcttccacttctcgggggtgctcttcttcctgctggtgtgggccaccaaactctaccgcttcagcacctactccttctcggncgagggccttcgcgccagcaccacgaccaccaccaccacgaccaccaccacgacgacgaccaacaccttcacgctctgcttcgccgacgccaacacttcccctttcacccccgataaccgaaccgcgctggatgc

SEQ ID NO: 29396 - DNA, 228 bp, Zea mays
  Clone ID: LIB3180-045-P2-M2-G6
ttgtttgattgagccgaacacaagcaccctgctgcccgaaacctcttctttggccggctttcggtggtatggtgcgatgatgactagggaggctgtgctgttgtccctcctcttctgcctcgccgctgccggcgaggcagtttcactggtgagccagggcgaggcggcggagctgaccgtgtcagtggacccgtctaagggcttccccaggcagcgggtgtggtacgc

SEQ ID NO: 29397 - DNA, 391 bp, Zea mays
  Clone ID: LIB3180-045-P2-M2-G7
ttttctttaccaactagcaacatagaaagcacaatagtgtaccaacaatggcagggggatattttgcttccttatgctccttggtctttctgcaagtgctgctaccgcaaccattttcccacaatgctcacaagctcctatagcttcctttcttcccccatacctctcaccagcggtgtcttcagtatgtgaaaacccaattcttcaaccctacaggatccaacaggcaatcgcagcaggcatcttacctttatcacccttgttcctccaacaaccgtcagccctattacagcagttacctttggtgcatttgttggcacaaaacatcaaggcacaacaactacaacaacttgtgctaggaaaccttgctgcctactctcagcaacagcag

SEQ ID NO: 29398 - DNA, 247 bp, Zea mays
  Clone ID: LIB3180-045-P2-M2-G8
tttttgagaaggaaatatctgatgatgaggacgaggaagataagaaggacggggggggcaaggaagaggatgttgatgagaaggaagaaaaggaaaagaagaagaagaagatcaaggaggcttctgatgagaggcaaaaggagaacaagcagaagcctataaggatgagaaagcctgaggagaataccaaagaagagaaagatgctaactacaagagcttgaacaacgactgggaggagcatatcgc

SEQ ID NO: 29399 - DNA, 336 bp, Zea mays
  Clone ID: LIB3180-045-P2-M2-G9
tttctttcttcctgtcagtagtagagtgagagtgaggcagcgagtgggagacagggggaaatggggaagggagcgcaagggagcgatgcggcggcggcgggcggcgaggtggaggagaacatggcggcgtggctggttgccaagaacaccctcaagatcatgcccttcaagctcccgcccgtcggcccttatgatgtccgcgtgcgcatgaaggcagtggggatttgcggcagcgatgtgcactacctaagggagatgcgcatcgcgcacttcgtggtgaaggagccgatggtgatcgggcacgagtgcgcgggcgtggtcgaggaggttgtctcc

SEQ ID NO: 29400 - DNA, 397 bp, Zea mays
  Clone ID: LIB3180-045-P2-M2-H1
tccctccgagcctcagttcgcatccacgcgcgccgccgccgccttgacgctgaccgcgcagccatggcggaacagactgagaaggctttcctcaagcagccaaaggttttcctcagctcaaagaaatccggcaagggtaagaagcctggcaagggcggcaaccgattctggaagagcattggccttggcttcaagactcccagggaagcaattgaagggacctacattgacaagaaatgcccattcactggaactgtttctatcagaggcagaattattgctgggacatgccacagtgctaagatgaacagaactatcattgttcgcaggaactacctccactttgtaaagaaataccagaggtatgagaagaggcactccaacattcctgctcaca

SEQ ID NO: 29401 - DNA, 406 bp, Zea mays
  Clone ID: LIB3180-045-P2-M2-H10
tttttgtgcatcaagtgactcttatccgccaagttgctgagaaagtgttcgccaatgtgggcaagactatcgggtacaaagttggaacaatgattgagatccccagggcagctctggtggctgatgagatagcggagcaggctgaattcttctccttcggaacgaacgacctgacgcagatgacctttgggtacagcagggatgatgtgggaaagttcattcccgtctatcttgctcagggcattctccaacatgaccccttcgaggtcctggaccagaggggagtgggcgagctggtgaagcttgctacagagaggggccgcaaagctaggcctaacttgaaggtgggcatttgtggagaacacggtggagagccttcctctgtggccttcttcgcgaaggctgg

SEQ ID NO: 29402 - DNA, 391 bp, Zea mays
  Clone ID: LIB3180-045-P2-M2-H11
tcttccacccccgtctcctccgatcggacggaccaccgggccagcagcggggcggatcgcgtcagcagccatggtgaaggcctaccccacggtgaacgaggactacctcaaggcggtcgacaaggccaagcgtaagctccgcggcctcatcgccgagaagaattgcgccccgctcatgctccgcctcgcatggcactccgcgggcaccttcgatgtggccaccaaaaccgggggccccttcggcaccatgaagaaccccgccgagcaggcgcacggagccaacgccggactggaaattgccatcaggctgctagagcccatcaaggagcagttccccatcctatcctacgctgacttctaccagcttgctggagtcgtggcagtcgaggta

SEQ ID NO: 29403 - DNA, 405 bp, Zea mays
  Clone ID: LIB3180-045-P2-M2-H12
ttttcaaggtcgagctgctgtcgccgatgccgcccccgccggaggtggaggagaagaaggaagatgaggcggagaagaagaaggacgatgagaagaaggcagagcccgagccgccgaagccggaggagaagaaggagccgccggtgatcgctgtggtgctgaaggtgcacatgcactgcgaggcgtgcgccgaggggatcaagaagaggatcctcaagatgaaaggcgtgcagtccgtagaaccggacctcaaggcgtcggaggtgacggtgaagggcgtgttcgaggagtccaagctggcggagtacgtgtacaagcgcacgggcaagcacgcggccgtcgtcaagtccgagccggccccggcgccggagggcggcggcggctacaaggcggccaaggaggagg

SEQ ID NO: 29404 - DNA, 378 bp, Zea mays
  Clone ID: LIB3180-045-P2-M2-H2
tcttgtttgtgaaaaggtgccagtgaggacgagtgcaagcacacgcccccactgggtggaaactgccgcagagccccgcaaaggcaacgactgaaactgctccggcgaccacgagcgcacctaaaccccgcctgcgtctcgacgccgagaagaatcttcgccttcgcgaagcctatgcatctcccctctccgccgacgacgcttactcgccgggactcgggagtcgggagcaatgcagctggaccaccacccctattcgctggacagccagaaggtgcggatggcgctggatgagaagggcattgactacacattttattacgtgaattctctcaccggcaaaaacatgaatggggactcctttcgcatgaacccttt

SEQ ID NO: 29405 - DNA, 382 bp, Zea mays
  Clone ID: LIB3180-045-P2-M2-H3
ttccgtcgtccgtccgcgcttcactatccttcattccctcccctgtcagcgacgactgggtaggctaccgccgccgccctacgctaggtgcccatctcttcgccggcgaagagcgcccaccaagctccggccaagggcgtgatggcggctgtaggcagcttgaagccggggatggagactcttcatgtgcaggactacaaggacgcgcctccggccaaggccgcggtagagagcctccagccggcgatggagagtctgcatgtgcaggattacaaggacgcgcctccggccaagggcgtggccgccgccgccgtagggagcttgcagccgggggcggagaacctgcaggtgcaggactacaaggacggtaacatgtattatg

SEQ ID NO: 29406 - DNA, 409 bp, Zea mays
  Clone ID: LIB3180-045-P2-M2-H4
tgtcttcgcgtccggtcatgggggagagatccaactcgttctcacaggactgcaagggttctagccctgctgaaaacaaactccaaccaggtgaaaagtccttcgcatcggaagcatatgcggtgaactggaacgaaccaccagacctgcaaatgcaagactccttcgagcgacctgagctatatcggaagcaatcagtgcaaggtgaaaagtccttcgcatcggaggcatatccggtgaaatggagcatatcaccatcactaggtcagcaatcacaagagtctttcgagccagaggcatatccgatgaaatggaaagaaccaccaccatcaggccaacaatcgcaagactctttcgagccagaggcatatcgggtgaaatggaacaaatcaccaccaccacaccaaca

SEQ ID NO: 29407 - DNA, 276 bp, Zea mays
  Clone ID: LIB3180-045-P2-M2-H5
gccttgcctcccactaaaccctagatctctctctctagaatgccgacgccttcggctctcagcaagcgcggcggcgacggcggggacggcatcctggccgccctctcccgttcgcaggtggcggcgcacgggcgagaggcggcggccgtggcgaagaagctgctgcggagcacggggaaggcggcgtggatcgcggggacaaccttcctggtgctggtggtgccgctgatcatcgagatggaccgggagcagcaagctaacgacctttagctgaag

SEQ ID NO: 29408 - DNA, 401 bp, Zea mays
  Clone ID: LIB3180-045-P2-M2-H6
aaaagaacccaacacgctctctcgcgcggcaagagcttcccggcccgaagccgaaagcaccaccaccaccaccaccaatctgtgcgtttttcgtctgcggcggcggcggcagcagcggaggaggtagacgagatgctgtccgccgacatccccccaaaccagaccatctacctcaacaacctcaacgagaaggtcaagaaagaagagttgaagagatcgctttatgccctgtgctcgcagtatggaaggatactggatgtggtggccctgaaaacgcagaaactgagagggcaggcatgggtggtgtttagcgagattacagctgctaccaatgctttccgtggattgcaagactttgatttctacggcaaaaaaatgcgagtacaatatgcaaaaacaaa

SEQ ID NO: 29409 - DNA, 211 bp, Zea mays
  Clone ID: LIB3180-045-P2-M2-H7
acggcggcaaagaaccaaacacgcaccggggggggaccaaaaagaacggggggggggccaaaaaaacaccaccacccccaccgcacgaacaaaccgagagcggcggcgggaacaaggacagggggggagggaaacgagaaggggggggccgaaacacgcccaaaccagaccaccaaccggaacgaaccaaaccagaaggggaaagaagaag

SEQ ID NO: 29410 - DNA, 324 bp, Zea mays
  Clone ID: LIB3180-046-P2-M2-A10
tttccaccactgctggaccggcatcccaggtggccattgccgcagctgtagatgggtcagattcaaaacatcatccactttctaatgccaatgcattcatacatgctgaccgacttctccttgaacccatcgccccactactacccgtacccaaacgcttgcgcgtggatgccgatgcttcctatggcagtaggtataggtggtgactgcagatgccctgcacctgaacggggctgcactgcttgtactgcgctggccccgccctaaccactaagctggtaccaccagatgggcaccgggactgcttgcgcttgcggcttcgat

SEQ ID NO: 29411 - DNA, 216 bp, Zea mays
  Clone ID: LIB3180-046-P2-M2-A11
ccacgtcatgcaacgcaacattccagggccatgtatcatggataagttgctggctcccacatatgaactagtctctatcatcatccaatccagatcagcaaagcggcagtgcgtagagaggatcgtcgaacagaacagcatgaagatggtcatcgtactcgacgtgtgcctggctctgctagctgacagtacctatgcaatgcagatgccatgcca

SEQ ID NO: 29412 - DNA, 142 bp, Zea mays
  Clone ID: LIB3180-046-P2-M2-A12
tcgtcgatcataggcagcgcagcaatgtctgcgggagtagtactcaacggccaaatgctgcctctaacctcgtcgctacccctgtccctgctgctgctcctccaactaagctgctcctgcacctcgtggggatggagcacga

SEQ ID NO: 29413 - DNA, 364 bp, Zea mays
  Clone ID: LIB3180-046-P2-M2-A2
actgtaataccagagatcgaacaacttggtcctgcagctcaagaagagaggtttgtgcatttgggggccgggggcaagagagagagagagagagccatggcggcggaccagcagccgcagctgcaggaggagatgaacgacgctgccggcggcggcctcaggctgcctccagggttccgcttccacccgagcgacttcgagattgtcagcttctacctcaccaacaaggtgctcaacacgcgcttcacctgcaccgccatcacggaggccgacctaaacaagattgagccatgggaccttcctagcaaggcgaagattggcgagaaagagtggtacttcttctaccagaaggaccgcaagttcc

SEQ ID NO: 29414 - DNA, 386 bp, Zea mays
  Clone ID: LIB3180-046-P2-M2-A4
gtcgcacatatctactatactatactctaggaagcaaggacaccaccggcgtggcagccaagatgcttgcattgttcgctctcctagctctttgtgcaagcgccactagtgcgacccatattccagggcacttgccaccagtcatgccattgggtaccatgaacccatgcatgcagtactgcatgatgcaacaggggcttgccagcttgatggcgtgtccgtccctgatgctgcagcaactgttggccttaccgcttcagacgatgccagtgatgatgccacagatgatgacgcctaacatgatgtcaccattgatgatgccgagcatgatgtcaccaatggtcttgccgagcatgatgtcgcaaatgatgatgccacaatgtcac

SEQ ID NO: 29415 - DNA, 227 bp, Zea mays
  Clone ID: LIB3180-046-P2-M2-A5
taagcggcagtgcgtagagaggatcgtcggacagaacagcatgaagatgggcatcgttctcgtcgtgtgcctggctctgtcagctgccagcgcctctgcaatgcagatgccctgcccctgcgcggggctgcagggcttgtacggcgctggcgccggcctgacgacgatgatgggcgccggcggtctgtacccctacgcggagtacctgaggcagccgcagtgcagtc

SEQ ID NO: 29416 - DNA, 389 bp, Zea mays
  Clone ID: LIB3180-046-P2-M2-A6
tgtagattcgtttgctgccattattaaccgagccgagccgagagaggtcaggcggcggacccccattcgcatccgcctccttttccttggagccgaagaagagggaaaggaagggaggacagccgccgccgccgccatcaccaccgtcaggatgcattccacgaacctcctgctcgaggagcccatccggatggcctccatcctcgagccctccaagcccagctacttcccggcgatgaccaagatcgtcggcactctcggccccaagtcgcgctccgtcgacacgatctccgcctgcctcaaggccggcatgtccgtcgcccggttcgatttttcgtggggggacgccgcgtaccaccaggagaccctggagaacctcaaagctctca

SEQ ID NO: 29417 - DNA, 382 bp, Zea mays
  Clone ID: LIB3180-046-P2-M2-A8
tcatgatggaggtcacacagcgtccacccatggccgtgacaaatgctgtgtcatggaggagcgaggggatccggtacaagaagaatgaagtcttcttggatgtagtggagagtgttaacattctagttaacagcaatggccagattgtgagatcagatgtggttggggcactgaagatgcgaacatatttgagtggaatgccggagtgcaaacttggcttgaatgatagggttcttttggaggctcaaggcagagcaactaaaggcaaagcgattgacctcgatgatatcaaatttcaatagtgtgtacgtttggcttgatttgagaatgtttgaactttatcgttcatacctcctgatggatcttttgatctatgacatac

SEQ ID NO: 29418 - DNA, 368 bp, Zea mays
  Clone ID: LIB3180-046-P2-M2-A9
tttattagccctcgttcccctcctcttccgctcgagtccatcgccgtcgccggggggctgccctcgtatcttctcccacgacaccggtgaccaccacaggccaccgtcctgatcctcatccgggtcatccccaggcaggcaggtcggcgaggagggcagcaagaccgagccatgcgggggctcgggacgggaacgggacaggaccccaaaatctcagatccttcctgctcgcccgcccgtgcccgtcggcgcgttttttttgccgtccgggccccacctccgcccttttcttcttcaggggaatcagatatgccacaagctgcgcgaaggtgatgtgggtttttggctacagctcccttatttggaac

SEQ ID NO: 29419 - DNA, 140 bp, Zea mays
  Clone ID: LIB3180-046-P2-M2-B2
gtcgcatcccatcccactaccacccatctcgtcgtccgccgattcgagcggggtcttccaacccaggggcagtgatggcgacgaagaggagcgtgggcaccctcggcgaggcggatctgaaggggaagaaggtgttcgtt

SEQ ID NO: 29420 - DNA, 330 bp, Zea mays
  Clone ID: LIB3180-046-P2-M2-B3
ttcttgcttctagagcaataagggcagcacattgcttaacttccattcagggggacctacatccgaacacatacttttggcatatggtcgtcgtcatagctcgctgcttaggagcatagtcgtggagggagaaaatgggattcctgtatatactattttggaggtatatagagtttcagatatggagcttgtgagagtgcttcctagtgccgaagatgaagtcaatgttgcatgctttcatcctttaccaggaggtggccttgtttatgggactaaggaagggaagctcaagatccttctacacaaaggcgcatacatgataaacatggg

SEQ ID NO: 29421 - DNA, 412 bp, Zea mays
  Clone ID: LIB3180-046-P2-M2-B4
ttctgattatctcaaagctgtcaagagtgtgactgcaatttctacagacaatggagatgattatccaaaatctgagaaatgaacattcaatttattacatttttagcaatgagcacatcaacttcttggttacgtacccattcgattttcgaattgatgagatgttatcgtactacatatcttttctgcgggcgataagtgggaagttgaacaagaatacaatttctttgctcgtgaaaacgaaaaatgatgaggccacttcctttcctttatattttgaggcctttaagtttgcttttcactaggataagcatatttgagtttttatacgtacctttacactcaatgtttatcacgtttgaaataatttgtaacccattttttttccggacgcctatttaaaatatttttt

SEQ ID NO: 29422 - DNA, 367 bp, Zea mays
  Clone ID: LIB3180-046-P2-M2-B5
tttaacctcgacgcgcctctgaaagtgcggagccgccggcccgtccgggggcctctccaactcccgtccccaaggccaatagttttcaagtggcaatggcggaccaggctaaccaacccactgtccttcataagctcggtggccagttccacctgcgctcgatcatctctgaaggtgtacgggcccgtaacatatgcccatctgtctcatcttatgaaaggagatttgccacaaggaactacatgacccagagcctttggggcccttcaatgtctgttagcggtggcatcaatgtcccagtgatgcagaccccgctctgtgctaattgctcctgctgagaaaggaggcatggaacttcatgattgat

SEQ ID NO: 29423 - DNA, 349 bp, Zea mays
  Clone ID: LIB3180-046-P2-M2-B6
tcggacgcgtgggaaaatgttcttattgaattctatgccccctggtgtgggcgctgcaagaagctggcgcccatcttggaagaggcagccaccactctcctgaatgacgaggaagttgtgattgctaagatggacgcgaccgccaatgacgtgcccagtgagttcgaggtccaaggctacccaaccatgtacttcgtgactcccagcgggaaggtcacctcctacgacagtggcaggacggcggatgacatcgtcgacttcatcaacaagagcaaggagaccgccagcgccgtccatgcgacggcgacggcatctggtaaggcagctgacgcatccgagaagaccgagc

SEQ ID NO: 29424 - DNA, 184 bp, Zea mays
  Clone ID: LIB3180-046-P2-M2-B7
tttgctgtactggagctgctaaggctgttggcaaagtgcttcctgtacttaacggagagttgactgaaatgtctttccgtgtcccaaccgtcgatgtttctgttgttgatttgactgttaggcttgagaagtcagcaacctatgatgagatcaaggctgcggtcaaggtctaggcataatgtat

SEQ ID NO: 29425 - DNA, 349 bp, Zea mays
  Clone ID: LIB3180-046-P2-M2-B8
tttatgtctagcatctttgatgctaaggctggcattgccttgaacgggaactgctgtaagctcgtgtcctggtacgacaactagtggggatacagcacccgcgtggtctacctgatccgccacatgaacagcaccaactaagatgaagaactcaaggtctggtgatacgagcgagttgtcttcttcccccccggagaaaagtgcttccgagaataaatttttttccattggaatgtctgaaactatgttgggtgtatcctagtggttgttgatcattaatggctcatatttcgtcaggtctatttgtcggcgtgaaacttttaatcaaaatagttcactcttctgcctt

SEQ ID NO: 29426 - DNA, 387 bp, Zea mays
  Clone ID: LIB3180-046-P2-M2-B9
ttctttcacggttctcctctctgtctctcgcgcaagggatctcgttctccgcggcggctggtgtttcgctcccttctcgccctccgacggctggttggcagccggcgccggcgccgccaaacgctaggtgctgaggccttcgccagtgtcttcgacggcgacgagcacgtaccagcatcatgtcggaaagaggtcgcctggcaggacgattgattgataaccgcagcagagggtaccatgtagtccctctagttgaggatcccagaggccatcctgaagtcctcgtggatggggatcggaggggcttctctgacattcgtggggttcatcaaacgtctggctaccctgacacccatttgtttgaggaacctatgggctaccctggtg

SEQ ID NO: 29427 - DNA, 409 bp, Zea mays
  Clone ID: LIB3180-046-P2-M2-C10
ttttctttgttccggacgatctccacatgggggcgccccaccccacctgggggccctcatcaccactgataaacgggcgccgcgaaagggaatagagcatcggccccgtgcaggtcgcagagcggctggaaaagttcaagacaacaattttcactcagatgagcatgcttgccatcaagcatggagcaataaaccttggccagggctttccgaattttgatggcccagactttgtgaaagaggccgcaattcaagctatcaaagctgggaagaatcagtacgcaagagggtttgctgttcctgaactgaactcgtctatcgctgaaaggttcctgaaggacagtggattgcaagttgaccctaccaggtgatggaaccttcaatgaggggggctggtgcaaacacaatc

SEQ ID NO: 29428 - DNA, 425 bp, Zea mays
  unsure at all n locations
  Clone ID: LIB3180-046-P2-M2-C11
tcttcctgattattgtgaccacanacagcacgcgctgcaaggccttttttttttgagaggacaaggaggagaggaggagatggcggtcacgatcacgtgggtgaaggcgaggcagatcttcgacagccgcggcaaccccaccgtcgaggtggacgtgggccttagcgacggcagctacgcgaggggggccgtacccagcggcgcatccactggaatatatgaggccttggagttgagggatggaggatctgattatcttggcaagggtgttcttaaggctgtcagcaatgtaaataacattattggaccagcaattgttggaaaggaccccactgagcaggttgagattgacaacttcatggtccaacagcttgatggaacctccaatgagtggggctggtgcaaacagaagcttggagcaaatg

SEQ ID NO: 29429 - DNA, 162 bp, Zea mays
  unsure at all n locations
  Clone ID: LIB3180-046-P2-M2-C12
tgncttcagaccatagcttatctactggagagcgcataagaacccgtcgacaccatgagggtgttgctcgttgccctcgctctcctggctctcgctgcgagcgccacctccacgcatacaagcggcggctgcggctgtcagccacagccgatggataattta

SEQ ID NO: 29430 - DNA, 420 bp, Zea mays
  Clone ID: LIB3180-046-P2-M2-C4
ttctcccaacaccacctcgcctgcgatctccgtagcctccgtcgcgtcgagcatcgatcatgtcggcctactgcggaaagtacaaggatgagctcatcaagaatgctgcctacattggcacccctggcaagggtatccttgctgctgatgagtccactggcaccattggcaagcgcctttccagcatcaatgtcgagaacgttgaggagaaccgccgtgccctccgtgagctcctattctgctgccctggtgctctccagtacatcagcggtgtgatcctcttcgaggagaccctgtaccagaagaccaaggatggcaagccttttgttgatgtcctcaaggagggaggcgtcctccctggcatcaaggttgacaagggcaccattgaggttgttggcactgataaggagaccaccaccc

SEQ ID NO: 29431 - DNA, 419 bp, Zea mays
  Clone ID: LIB3180-046-P2-M2-C5
ttagcattgcgaccacagacagcgcgcgcttcaaggccttttttttttgagataacaaggaggagaggaggagatggcggtcacgatcacgtgggtgaaggcgaggcagatcttcgacagccgcggcaaccccaccgtcgaggtggacgtgggccttagcgacggcagctacgcgaggggggccgtacccagcggcgcatccactggaatatatgaggccttggagttgagggatggaggatctgattatcttggcaagggtgttcttaaggctgtcagcaatgtaaataacattattggaccagcaattgttggaaaggaccccactgagcaggttgagattgacaacttcatggtccaacagcttgatggaacctccaatgagtggggctggtgcaaacagaagcttggagcaaatg

SEQ ID NO: 29432 - DNA, 378 bp, Zea mays
  Clone ID: LIB3180-046-P2-M2-C6
ttttcgaaactagtcttccctcctgctggcggggtgcggagggccggaggccgggtcgacaagaggagatgacgttggcggcggggctgggttacgccctgatcgcgctgggccctgccttctccctcttctccggcgtcgtcgtcaggaagcccttcctcgtcctcaccctcctctctagcaccttattttggcttataagtttgatagtcctctcgggaatatggagaggatttcttcctataaagtcaggagcttggtgggcatatgtgattctgatccttacatctgtcgcattgcaagaaggcacttcgtcttgtgttttggatgctttacaagaaaatggaagaggatctagatgcttttgctgttagaata

SEQ ID NO: 29433 - DNA, 365 bp, Zea mays
  Clone ID: LIB3180-046-P2-M2-C7
tgttctcaccaagctgtcccccgaccactccgccgcccgctccaatggcgggggcggccagctcctcatgcttccacccacgcgcgaccgccagcccgccgtcttctctcagcgtcggcaccaaggtcttcgtcgggctcagggcgcagaccaagctcggttcgtcggagtcgacatgcccgaatgtcagcgctgggttccacactgcggtcaaccggagaatctctctcaggttgtccaaaaagaaggcgaccagagcccgcatctcgatgatgcctagtggtactccacgtgtgccttaccgtacccctggtgtaggaacctggcaatgtgcttgcatatgtaacgctcctttccgtgtgcgg

SEQ ID NO: 29434 - DNA, 152 bp, Zea mays
  Clone ID: LIB3180-046-P2-M2-C8
ttctagaccccaagcaccaccgcggcggcggcgaccatggctgtcggaaagagcaagaggatctccaagggaaagaagggcggcaagaaaaagaccgtcgaccctttctctaagaaggattggtatgacatcaaggcaccgtcggtgttcag

SEQ ID NO: 29435 - DNA, 136 bp, Zea mays
  Clone ID: LIB3180-046-P2-M2-D1
ttgaacaagtaatctatgatggcaatgtttgcctggtcatgaagtattattactttcgttgaaaccgtgatgctattaagacttaattttttttatggaacatcgaatgtaaggcatacatggttatgagttttgt

SEQ ID NO: 29436 - DNA, 340 bp, Zea mays
  Clone ID: LIB3180-046-P2-M2-D10
tcttatatcttggattctacccaaacaaacctattgcaattctccatatctacaggactcttctacactgcagatcattctaccagaaagaactatagttttaacacaccattcaacaattaaattaatattcagtcactggactacactgacaaggagccatcttggctctcatatccatccacacttatactgttcttccaacaaacactgaaaccacgctggaccatctgggttcactccttatacgcgcaaatcatctgctccatcttacgggagggtgtcttttaacctgcgatcccaaccacaaagacccatgcttgctagccttggaatgaac

SEQ ID NO: 29437 - DNA, 187 bp, Zea mays
  unsure at all n locations
  Clone ID: LIB3180-046-P2-M2-D11
tgctatatctgttatnctccacaggcaaacctggggcatcttgacagatttgcaggtgtcttttacactgtatatcattctaagttgaaagaactattgttttagaccttattattcaaacaatcgactctgttattgtgtcccattacaacattgactagtatccattttgtctcttctctcttat

SEQ ID NO: 29438 - DNA, 333 bp, Zea mays
  Clone ID: LIB3180-046-P2-M2-D12
tctttatatctctgattatccactgccaaaccgagtgcaacttggcttatctagaggtgtctttttcactgcagaccattcgtagctggaagatctcgattgtgtgaaccaattattacaccaattagaatctgttgttcagtccctgggctacactgagcaatgagccatatccactatcaaatcaatccacactgctagtattcctcggacgaacactcaattcacctgtacaacattgcattcactgctcacagtccacattgatctgctgcaactttcgggaggctgttttttatcatgacctccactgtacagactattacccttgat

SEQ ID NO: 29439 - DNA, 337 bp, Zea mays
  Clone ID: LIB3180-046-P2-M2-D2
tgccaaccgaggcaactctcaaagtttagggtctgaacccagagctggctggagggacgaataagaagccccttgatgcgagccttctacatggctagctcccaccatggatccaccaccgcccccaagaacctacccgtcaactacagcctgccagtaaatgacaccgcgcgctaccgactacacttttactacttacagggccaggacaagtactatcatgtccacacttagctctacggattcaccacattgcgcatgaacattccttcatgccccctttaggtgcactacccacctatactgtcctttcatgcctccataagatttctaccaa

SEQ ID NO: 29440 - DNA, 244 bp, Zea mays
  unsure at all n locations
  Clone ID: LIB3180-046-P2-M2-D4
tnctgctccactcccaaatttgttgccttgaggcggcggccggcgggagagagcagctctagagagaacagagagcgcataactagcggcggcggcgatgaggatagaggaggtgcaatcgacctcgaagaagcagcgcatcgccacccacactcacatcaagggcctcggcctcgacgccaatggaatgtcgatgccgttggcggcggggttcgtgggccaggcggcggcgcgcgaggcggcc

SEQ ID NO: 29441 - DNA, 355 bp, Zea mays
  Clone ID: LIB3180-046-P2-M2-D5
tttttgaccacagatctatccattctggcgttcacctttatgtagtatggagcgctgatgatcctgatcagacaccgtgaggattgtgttcgttcggatcggtaggctgggggccagtgtggccatgcactgtgaccatacaaagctcgtctgcgtgtacgacccattgatcagcaccgactacatgacctacatgttcaagtacgacactgtgcacggacagtggaagcaccatgtagtcaaggtgaaggactccataacccttctctttggtgagaaggaggttgcatgtgtttgcctgcacgaaccctgaggagatcccgtgggggtaggttggtgctgaatattgttgtga

SEQ ID NO: 29442 - DNA, 361 bp, Zea mays
  Clone ID: LIB3180-046-P2-M2-D8
tttctcttccgtcactttgccccgcctcgtcgcctgcttctacgaccaccgtccagcggcgacaaggacagcgacgatgcagtcggcggcgtggaggcgtcacctccttgaccaccacctctccccttccacctcggctgccatcgccgccttcagatccgcctcccagcccgggctcgctccccaagggttgtttggagcggatggcgcaagatgcatgtctgcgagggcgccggcggtcaaggggtccgggcatctcgtccgcaagggcaccggaaggaggtcttctgtgagttgtattgtttccacggtgtttggagctactgtttttcttgagcgctttcttttgcatcaacttgtc

SEQ ID NO: 29443 - DNA, 393 bp, Zea mays
  Clone ID: LIB3180-046-P2-M2-D9
tctgtacgcgtgggtgaagatcctgaaacgcacgttaataccgttgacgtccgcgtcacccagctcgattttcagtcttgtaatactaatcgctccatgagtctgaagtgtgcaaaaatttaggtggcagctacacaaatttacatgctggttctgttcaacccgtgaatctcctattttggaaaggtcacagcgtttttatttcattctatattatatttcagtctggactaatgttgagatctccatatgtatctacgtctaagcatttttcatttgtatttaccatgttggtcaattgggatatttgtttcttgtatggtagcatgtttgaaccatagcaattggtggacgtgtgtagagaagattgcaaaacttgagtatgttggattt

SEQ ID NO: 29444 - DNA, 425 bp, Zea mays
  Clone ID: LIB3180-046-P2-M2-E1
tgcaacatagaaagcacaatagtgtaccaacaatggcagccaaaatattttgcctccttatgctccttggtctttctgcaagtgctgctacggcgaccattttcccacaatgctcacaagctcctatagcttcccttcttcccccgtacctctcaccagcggtgtcttcggtatgtgaaaacccaattcttcaaccctataggatccaacaggcaatcgcagctggcatcttacctttatcacccttgttcctccaacaatcatcagccctattacagcagttacctttggtgcatttattggcacaaaacatcagggcacaacaactacaacaacttgtgctagcaaaccttgctgcctactctcagcaacaacaagttcttccattcaaccaactagctgcattgaactctgcttcttatttg

SEQ ID NO: 29445 - DNA, 441 bp, Zea mays
  Clone ID: LIB3180-046-P2-M2-E10
ggaaagctgacacacatgcagataccattaccgaatttccccgttgccccaaacactttgttacacaccttgatccacttcctacgtgaagcataacctaaggagcacggtgggccctctttgctgaccctgcttaatgatcttaccgacaactagcccaatcacggcccacttgtgccatcggttgtcatggaaatatcaacattcagataggagctatgcccaacatacatgaatgagcgcatatactaccggacctatttttcactcgtacacagccatatagatgcacttgagaagaaatactttgagctgctgaaagtgttagcagctcaagagcaaaggtttcccttaccaagcattccatgcatctacaactgcagaaccgtaagacacaaaagtgccatgcaagaccgattcgacaaatccagaacatgacct

SEQ ID NO: 29446 - DNA, 128 bp, Zea mays
  unsure at all n locations
  Clone ID: LIB3180-046-P2-M2-E12
acatttgtgacccacgccacactactncgctacggcaggatgatccaatgaaaggggtggatcttcctgcttctccctcttaccgtctctctctcacacctggcgcaaacacagcccacctgcgccat

SEQ ID NO: 29447 - DNA, 241 bp, Zea mays
  Clone ID: LIB3180-046-P2-M2-E2
ttctttttggctcagtggccatgcctccggggacaagctccctgcggtgccgctccaccaccggcggctcctctacccgcgccgcggcagcggtcgcagcgatctccaggcccgccgcaccttcctcctcgtccccgcccgcccgctcgaccccgaggccgcgctccagcccggcgtcgcccttcgcatccggcctcgcgagccgcctcttcggtggccacccggccatcgcccgctccgt

SEQ ID NO: 29448 - DNA, 178 bp, Zea mays
  Clone ID: LIB3180-046-P2-M2-E3
tcaaacacagcgcgctccgcagacgcccaccaagcttccgctattcaccagggggtccccttctgccctccgccctatctatccatggaaaggcggcacggcttcttcgcggcgctgcgggaggaggtggcgcgcggtctgtcgccgtcgcggtctcgccttatgcctgacgccacgg

SEQ ID NO: 29449 - DNA, 287 bp, Zea mays
  Clone ID: LIB3180-046-P2-M2-E4
taatcactttgcgtgcagcatcaattgggtcggaaatcgagggtttggtgaagggagatcaccctcagttacatcttacagggacgagatggacaccgccggaggcagagtattgttcgccgaactattcattcttatggtcttaaccatcttacccattctactttggcccccactgtcccataccgacacctcctataaccaccctgtcccgacccttaccctacacgagtatcagtgttctacaccatcaagcgtctggctgactcaccctttactgtgctggg

SEQ ID NO: 29450 - DNA, 120 bp, Zea mays
  Clone ID: LIB3180-046-P2-M2-E5
tgctgctcactcccacggtcccactcctcaggagcgtccatagtttaggtgctcagagagtcctaatggaggtggtaagttactatttcctcaatgttgttcatcaaagactctttcttt

SEQ ID NO: 29451 - DNA, 382 bp, Zea mays
  Clone ID: LIB3180-046-P2-M2-E6
ttctttccgctacggcgagctggtttctggtttgcagaggatccaagaacaggtggaggagcacaagaggcaactcaaggtacaagaggcggtagaagccgaaagtcacgctcaggaagaggaagctgcggcatcaaatcatgctgctgctgaggaagaggatgaaaggaaggaagatgatgaaaggaaggaagaggatggaagcaagtctctcagctctgaagagaaaccacagcagacaagtacggctaccgatgaagaacctgcaggaagcaaaggaaccaccgaggatcagatggacgtggacagcgggaatggagatggtggagttgtttgccctgtccaacctgctccagacactgaaggggtatatgactaatta

SEQ ID NO: 29452 - DNA, 396 bp, Zea mays
  Clone ID: LIB3180-046-P2-M2-E7
tcttttttccctagccgccgccggctccaagcccgtgccctccgacaccttcacgtgggtcttcttccctgccacccaccagcccgcgtgcctgctctcctcgcccgcgcccgggtctctgcgccgccgggacgtcgccgccatggtctccgcgccgccggccgtctgcaccgccatgccgtcgctcgacttcgacacctccgtcttcaacaaggagaaggtctccctcgccggccacgactagtacatcttgcgcggcgggaggaacctgttcccgctgcttccggaggcgttcaagggggtcaagcagatcggagttattggatggggctcgcagggtcctgcccaatcccaaaacctgagaaatcacttgcttgaacccagtcaaatattgtt

SEQ ID NO: 29453 - DNA, 337 bp, Zea mays
  Clone ID: LIB3180-046-P2-M2-F1
tctttcaacacctgctcctcgcccccttctctcagaggcgacgcctcgggcgggcctaccctgccccgtctccggtccccccgcgccgtcggcgaggcagccggccgtcacagaagcccgatccggaccccgcgagaaatccttgttatacctgatggctatgattgatgagcctctttatccaattgctgtactgattgacgagctcaagaatgaagacatccagttgcgtctaaactccattagaagactttcaacaattgcacgggctcttggagaagaaagaaccaggaaagagctgattccttttcttagggaaaacaacgatggagaagac

SEQ ID NO: 29454 - DNA, 262 bp, Zea mays
  Clone ID: LIB3180-046-P2-M2-F10
tgtcgtgttcatccgctccctgcgctgcgagcggacccagaagcaggtccgggggatctccatacacgagaagcttaacgggcccttcgactcgcgacgctacctcggcctgatgcgcgcccaccttaggccctagcccttcgaccgcccgctccgcgacgccttccgcgtcctcgacaaggaccgctccgtcaccatcagcgtctccgacctacggctcgtcctcacgtccataggagagaagctcgtggtgcactagttc

SEQ ID NO: 29455 - DNA, 199 bp, Zea mays
  Clone ID: LIB3180-046-P2-M2-F11
agaagctcacggcgcccatcgactacccacgcttcctcggcctcatgcgcgcccacctcaggcccgagcccttcgaccgaccgctccgcgacgccaaacgcgacctcaacaaggacggctccggaaccgtcgacgaccccgacctcagccacgtgctaacaaacatcagagagaagcacgaggagcaccagttcaacaa

SEQ ID NO: 29456 - DNA, 297 bp, Zea mays
  Clone ID: LIB3180-046-P2-M2-F12
ttgtcttattaataacctcactataaaccatcctgtactaggagtaggtccgggggtttttgatgcagctgtaacttacggcacccttctaatggcgacgctactttatcatacagccgcgatcaaaagcccttccctaaaccgccgctcctaagccttggagactgaacgacagtagaacatgacagatgtctatgagcatacaaatctaagctgcatgtaaaactgatgagcaacggcttataaaggaatgcaatgtcagagtttctctatgacaaatataatgactcaatcatt

SEQ ID NO: 29457 - DNA, 352 bp, Zea mays
  Clone ID: LIB3180-046-P2-M2-F2
tcaactagcaacatagaaagcacaatagtgtaccaacaatggcagccaaaatattttgcctccttatgctccttggtctttctgcaagtgctgctacggcgaccattttcccgcaatgctcgcaagctcctatagcttcccttcttcccccgtacctctcaccagcggtgtcttcggtatgtgaaaacccaattcttcaaccctacaggatccaacaggcaatcgcagctggcatcttacctttatcacccttgttcctccaacaatcatcagccctattacaacagttacctttggtgcatttattggcacaaaacatcagggcacaacaactacaacaacttgtgctagc

SEQ ID NO: 29458 - DNA, 216 bp, Zea mays
  unsure at all n locations
  Clone ID: LIB3180-046-P2-M2-F3
ttttgttggcttctcctccccctccggttcgggttctgattcaagaggttgtggggttttcaatttntttaattatcttatttagatatcttacttctatttttcaaatataatatatatatctatatttattaattattttatttaattttattaatattatataaatatatttagttaaataatattcatatatattattttaatatattataa

SEQ ID NO: 29459 - DNA, 371 bp, Zea mays
  Clone ID: LIB3180-046-P2-M2-F4
cttcaaccgaaggagttaccaagtatttgaagcctgctgttgccggcttggtcatgcagaaggaacttgactaccttgttggagctgttgccaacccaaagaagccatttgccgctattgttggtggatccaaggtctcaagtaagattggtgtcattgagtccttgctggcgaaggtcgatatcctcatccttggtggtggtatgatctacacattttacaaggcacaaggatattctgttggaaaatctcttcgggaagaggataaacttgagctcgcaactttcttttattgagaaggcgaaggcaaagggggtttctcttttgcttcccactgatattgtagtagcggacaagtttgcagctgatgc

SEQ ID NO: 29460 - DNA, 421 bp, Zea mays
  Clone ID: LIB3180-046-P2-M2-F5
tttcaatcatcggagttccccgacgccgatgggcgacagccgaagccgacacgggtctcctacgccgccacagcctggggcaagtcacggacggagatctctgcggagctacccgtttggctgctttccttcgtattggttactagtctgttgctatggggaaatccaaagacaagaagggttcgcgggaagcgaaggaggacaagaaattggcgcttggggtgaagaggaagcagctgaagaggaagaaggacagagtgttggaatgtgccgacgatagcgaacccgctgccgggcatggcgttaaagaagaaaaagaattgacaaggagaaagaaaatttcattggtgaagcagaagaagaaaaattagcatgccaatgttaagagtaaccatgatacggcagatgctgtggcggaatc

SEQ ID NO: 29461 - DNA, 429 bp, Zea mays
  Clone ID: LIB3180-046-P2-M2-F6
tcttctttccgtgccaacggagactgaccgaactgggacgctatgcccggaccgtggggatagataaactattcatctggttgagccaggctggccctatttattccaatggagactagactagcgttagctgaaagataggatttcaaagataggtgttccccatgatagcagtacctttctccctttcgtggtggaatggaccgcgagttaactgagccttccgtacacagtgagacggccttttcgagacaagtcagaaagctcttaagtccagtaagctaagcaaagctttccgttggactagcaatatcggatgaaggaagcagcggtgaacggagtcaagctattggctggttctagcccacacgagatgtaagtcctgatttcctgtaccggaagataatgagcatcgcggtaagagagagt

SEQ ID NO: 29462 - DNA, 424 bp, Zea mays
  Clone ID: LIB3180-046-P2-M2-F7
tttcttcattttccctcatgaaattgaagacacggaacaaattattggagcactggtggcttgttatttactcccttaccctgattccacttgttaagtacgtgttcattgtcttgagggcaaatgataatggccaaggtggaacatttgctctttactcgttgctttgccggcatgcaaagataaacactattccgaatcagcatagaacagatgaagaactaacaacatacagccgccacacatatgatgagaaatctcttgctgcaaagatcaaaaggtggttagaggggcaccaattcagaaagaatgtcattcttattcttggtctttttggtacttgtatggcagttggagatggaatcctcactcctgcaatatcaattctttctgcaactggaggaatacaagtggaagaggaaaa

SEQ ID NO: 29463 - DNA, 386 bp, Zea mays
  Clone ID: LIB3180-046-P2-M2-F9
atgcaattcgattgagcggtgcacatgatatggtgcgtggagtacccccatactatcactactttccacaaaagacataccaccattttccacgagaggtatgtgtttatcttgcttcccttttaccttcactagcaatttgatctagtattgcgaaagggcctctagcctagcggttaaggacttccgagtagcacctccaagtcctgggttcgattcctatcgagagcgaattttcaggcttggttaaaaaaatcccctcactgtgccccatccgctctcgggttgcgatgtcctgtgcgccacccttccggagggccagggttcggggattttctcggccgagaccgggtctttccctcccctgccgagtttttttttaactt

SEQ ID NO: 29464 - DNA, 359 bp, Zea mays
  Clone ID: LIB3180-046-P2-M2-G1
ttcccaatctcggcgtcaccgccctaaatgtagcaaacggaaatcccatggggccgccgccgcgatgtctcgccgctatgacagtcgcacgacgatcttctcgccggaggggcgtctctaccaggtggagtacgcgatggaggcgatcggcaacgccgggtcagccctcgggatcctggcggccgacggcgtagtcctggtcggcgagaagaaggtgacctccaagcttcttcagaccttccgttccgcctagaagatgtacaagatcgacttccacctggcgtgcgctgtggcagtgatcatggccgacgccatcattctcataacaccgtccgtcttacgctcagcgtttcgcgctt

SEQ ID NO: 29465 - DNA, 427 bp, Zea mays
  Clone ID: LIB3180-046-P2-M2-G10
gtcactgggttcttcccgcaggaaagtggtttctccaggtttgactccattagcagctccaaaggcgaggatgtatcaggattcgatacagggaatagctcaagaaattttggtcggtttgactctttcgatgacaccgatccgttcggttcgagcggaccttttaaagcatctggaagccggtctccacccaagttctgatacgttttctgctctgagtagggatttgtgtcttgcgtgctgctgatttgtcaatacaaggttcagattctttgagcgaactctagcgtaacaagaatatttctcctttgctcgacatttcttccgtttgccttgtgtgcaatttttccaggccatctcacgtacaaagtggacaggtttgggttatatctttgtatttgataaacatttttctgtatcttggaaa

SEQ ID NO: 29466 - DNA, 307 bp, Zea mays
  unsure at all n locations
  Clone ID: LIB3180-046-P2-M2-G11
acctgttacgaggtgggccgngctcgtaaccggagcgcttcggttatgggaactaccggcaccaggccgatgtgtgccatgcgtaccagatactgcagaagggaggagtaaagaaggagaacaatgaggagtcaaggacgacgaaattgcccacatacagcatgaaccctaaggcaggaggtagcatgaaccatcccaaaggagcaaacgtatatgagggagtgcaaaagaaaaacacaggtgaacaggacatcacgagaaaacataggtaaaagtacacatagggcaaacagaaagagataaccaa

SEQ ID NO: 29467 - DNA, 336 bp, Zea mays
  Clone ID: LIB3180-046-P2-M2-G12
ttttctaaccctagccgcctcctgcaagttggagagctcatgaatcggcgcggtggggagtgagacggagaccttcgcatttcaggctgagatcaaccagctgctctcactaataatcaacaccttctactgcaacacggagatcttcctacgcgagcttatctccaactcttccgatgctctggacaagatcaggttcgagagtctcactgacaagagcaagctcgatgcgcatcctgagcttttcatccaccttgtcccagacaaggccacgaacacgctcttcatcatcgacagcggcatcgtgatgaccaaatccgaccttgtcaacaacct

SEQ ID NO: 29468 - DNA, 325 bp, Zea mays
  Clone ID: LIB3180-046-P2-M2-G2
ttctgccttgaacatgttcaagggcacctatgaggctatcacaaaaggcaacggggggtggaaccagctaactgtcccagaagcgtcactctactcatgggattccaaatccacttacattcatgagcccccttactttaaggacatgaccatgtccccacctggcccctctacagtgaaagatgcctactgcttgctgaacttcggggacagcatcactacagatcacatttcacctgcaggaagcatacacaaagacagtcctgctgctaagtatttgttggagcgtggtgtggaccgttaggacttcaactcatatggtatc

SEQ ID NO: 29469 - DNA, 433 bp, Zea mays
  Clone ID: LIB3180-046-P2-M2-G4
tctttcgtgaaacttgttccctacaagattattaacaaggatggcaagccctacagggaggtcaagatcaaggatggggagaacaaggtcttcagccctgaggagatcagtgccatgattcttggcaagatgaaggatactgctgaggcataccttggcaagaagatcaatgatgctgtcgtcactgtccctgcgtacttcaatgatgcgcataggcaggcaaccaaggatgctggtgtcattgctggcctcaatgttgctaggatcattaataagccaactgcggctgctattgcctatggattgtgtcatgcagggttgcgagaagatcatccttgtcttttacctaggtggtggcacttttgatgtcagtatcttgaccattgacaaccgggtgtttgaggtgcttgccaccaatgggtgacactcattt

SEQ ID NO: 29470 - DNA, 345 bp, Zea mays
  Clone ID: LIB3180-046-P2-M2-G5
ctcgtctgccttctgcacctccgagggtttctttgggcgggggggggggaatctcacctccaaccatttttattgttcattcccacaaaaacctcaagaaattttggccggtttgactctttcaatgacacccatattacacctgttctacacccttgtaatacatttacaaacgccttattccaccccaactacatatcctcttctgcactgaatagggttttgtttactgccgtctgcttgtttgtcaatacaaggttcatattctttgagcgaactctaacgtaacaagaatatttctcctttgctcgacatttcttccgtttgccttgtgtgcaatttttc

SEQ ID NO: 29471 - DNA, 140 bp, Zea mays
  Clone ID: LIB3180-046-P2-M2-G6
tttttggcggacggcgcgcccgccgcgcgagggggggtgacacacaagaggggcggcgagaaagcaagagtgttccactcgctggagggctgggcggctcggttcatcctacaacaacacaaacccgtgtaggagcaagg

SEQ ID NO: 29472 - DNA, 352 bp, Zea mays
  Clone ID: LIB3180-046-P2-M2-H1
gggaaatttataagagaatcttcaggtgctggggacaataactgttctgggtcaatatgcactgagagtgctgagtttaatgaagatgatatctggtacagggtatctggttttgataaatggaaccctgctgctgcaaggaatccagaatttgccagcatccacagaaatgaagtgattggaataagacagttgatggagtcaagtggaaagtatgttgttgacgatcgaccttcctcttctaattacgataacatccagtatgtgacaacactatacagctcgaggctgcattcttcactttctggaaaacttagtgcatctgcaagttatgaagatgatatttctggtc

SEQ ID NO: 29473 - DNA, 296 bp, Zea mays
  Clone ID: LIB3180-046-P2-M2-H11
cactcgcgaactccatttcgatcccatttgaaatcaacccatcctcgtttcctccgtctagcagcctctcaccctcatggccaagatcaagatcgggatcaatgggttcggcaggatcggaaggctggtggccagggtggccctgcagagcgacgacgtcgagctcgtcgccgtgaacgaccccttcatcagcaccgattacatgacctacatgttcaagtatgacactgtgcacggacagtggaagcaccatgaggtcaaggtgaaggactccaagacccttctctttggtgaga

SEQ ID NO: 29474 - DNA, 366 bp, Zea mays
  unsure at all n locations
  Clone ID: LIB3180-046-P2-M2-H12
tctttcgcgagcatagcttctatgcctatcggtgcggtactctactctcggcgggtggtttgnccaaagcttcgagatggctcagcagcagaaggtggtggtcagggttccaaccatgacagatgacaagatcaagcagaaggccatcgaagctgttgcggacatttacggtattgactccatagcagcggatctgaaggagaacaagatgaccatcataggcgagatggatgcagtagcgattgccaagaagttaaagaagattggaaagattgacattgtgtgctggtggacctgcaaaagaagaaaagaaggaagaaaagaaaggaggagaaaaaaggagggaaaagaaagaagaggaagaaa

SEQ ID NO: 29475 - DNA, 421 bp, Zea mays
  unsure at all n locations
  Clone ID: LIB3180-046-P2-M2-H2
actcattttaataaagctcgtacgccttcattacccttctctaattcctagatcgacccactcgctcgttcatttagtctctaaaatcnacagggggatccttttcatacatatacatgtttgtaaatattccatcataacaagtaaacattcttaaatttacgtttttaataactccctttccatcataaacaaaaagaacatcttttattttatatcttttattactcattttcactatactaattttatatttacacatttcctttattaatcatctttttattttctcctatattttatattttatttttaattaacttatttttcatctctataatacctttattattaatcttttatataatttttcttattttttcttttatactaatactatatctttttttattttttttat

SEQ ID NO: 29476 - DNA, 353 bp, Zea mays
  Clone ID: LIB3180-046-P2-M2-H3
tcaacctgtgcgccatccatgctaagcgtgtgaccatcatgccaaaggacattcagctggcaaggaggatccgcggcgagagggcctaatcgccacctcaaacatcgtgacaaaaacatgaagtcctggggttattgttaatctggtgccattgtaaggacatatgagtagggtttgttttgtggatcgcaagtttctcttctgctactgttgctgctacctttgctggtgttattgctagggtcgaatacttaagttaactatgcgctgacagtctggactagcagtgttatgtgcgctgttggaccttgcgcgcaatgctttggcccgattgttcgttaatgtcatgaatt

SEQ ID NO: 29477 - DNA, 299 bp, Zea mays
  Clone ID: LIB3180-046-P2-M2-H4
tctatcagtggtcctttcgataatggaggtaccagcaccaccagcatgggcgggccccctcgcgacgacgacgacgatcctgctggtcacggccgccctcgtcctcgtgacgacgaccgtcctccgccggcgtgcccaccgccaccggaaacgacaacgacaagcgccgccgggccctcggccctggccggtgatcggcaacctgaacctgctaggcgcgctgccgaaccgttccatccacgagctctcggcgcggtacggcccgttcatgtcgctccgtttcggttccttccccgtcg

SEQ ID NO: 29478 - DNA, 330 bp, Zea mays
  Clone ID: LIB3180-046-P2-M2-H5
tggaggccaaggcgctgaacaaggaggcgctgcatgcggaggtcgggctcggggtggaccggaacatcccgctggtggcgttcatcggcaggctggaagagcagaagggccccgacgtcatggcggccgccatcccgcagctcatggagatggtggaggacgtgcagatcgttctgctgggcacgggcaagaagaagttcgagcgcatgctcatgagcgccgaggagaagttcccaggcaaggtgcgcgccgtggtcaagttcaacgcggcgctgtcgcaccacatcatggtcggcgccgacgtgctctcctttactagccgatttgagc

SEQ ID NO: 29479 - DNA, 394 bp, Zea mays
  unsure at all n locations
  Clone ID: LIB3180-046-P2-M2-H6
ttatctcaaggcatggaatgcacaaaatgctggagctgctgcagatcttgtgggggatnacaagatagaacctctaatcacaatggacaacccagaagaaggcaaagagcacctagaaaacatcagtnttncctcagtgcttataacaaagaaattgggggaaaaccttaagaaatccgcggaaaatggcgatatgctcagcgttcttctggactgnnnagaatccctatcccatcctgatgagcgtgtagagtatgagttctggacaaacagtaatgatgaatgtggtccaaaatgtgatatgcaaatggacttcgtgaggagctttagaggaactgcacaaattcttgagaaaatgggttacactcaggttactcctcattatattcacatg

SEQ ID NO: 29480 - DNA, 389 bp, Zea mays
  Clone ID: LIB3180-046-P2-M2-H7
ttttatactttggattggtcaggcttgcaccagatgatgggaagtgcgtctccgtagagacaagacttgctggcacttttgggtaccttgcaccagagtatgcagttactggacgagtgaccacaaaagctgatgtcttcagctttggtgtcatcttgatggaactgattacaggacgcaaggcacttgatgagactcggcctgaggatagcatgcatctagttacatggttccggagaatgcagctgaacaaggaaacattccgcaaggcaatcgaccctgttattgaccttgacgaggagacatatgctagcgttagtactgtctcaaagcttggtggtcactgctgcgctagggaagcacaccagaagcctgacatgggccatgct

SEQ ID NO: 29481 - DNA, 265 bp, Zea mays
  Clone ID: LIB3180-046-P2-M2-H8
tttcgatgatgcatccgctccgccgcatgcgcgtgctcttcctcgtcgggctgtccccgcggccgcgtggtccttggcaccaccccgcttcccgaggccccaaccccgctcgcggccgggagctaatggggtgggagactacgagtacgagacgcgatacttccggcagcggctggaccacttcagttttccaggggtcggggacgaggacgaggcggcggcgttcttccagcagcggtacctggtgggccgaggcattggatgg

SEQ ID NO: 29482 - DNA, 338 bp, Zea mays
  Clone ID: LIB3180-046-P2-M2-H9
tattcctcccaacaccacctcgcctgcgatctgcgtagcctccgtcgcgtcgaggagtcgatcatgtcggcctactgcggaaagtacaaggatgagctcatcaagaatgctgcctacattggcacccctggcaagggtatccttgctgctgatgagtccactggcaccattggcaagcgcctttccagcatcaatgtcgagaacgttgaggagaaccgccgtgccctccgtgagctcctattctgctgccctggtgctctccagtacatcagcggtgtgatcctcttcgaggagaccctgtaccagaagaccaaggatggcaagccttttgttgatgt

SEQ ID NO: 29483 - DNA, 103 bp, Zea mays
  Clone ID: LIB3180-047-P2-A1
ttgtacttctccagcggcggcatctctgggtcggagttcatcccattcaggcaacctgctggtggctctaggccggaggtgagtactgtcctcaaccatgccg

SEQ ID NO: 29484 - DNA, 72 bp, Zea mays
  Clone ID: LIB3180-047-P2-A10
gttggcttctcctccccctccggttcgggttcgggttcgtgaggttctccggggttcggattttttttttag

SEQ ID NO: 29485 - DNA, 111 bp, Zea mays
  Clone ID: LIB3180-047-P2-A11
ctcctccaccaccttccagtcctgtccagtgccgccgccttgccctgccctcccctcccttcccccgattaccctcgcggttgacctcgtcaatcctgtcccgtctccgta

SEQ ID NO: 29486 - DNA, 249 bp, Zea mays
  unsure at all n locations
  Clone ID: LIB3180-047-P2-A2
tttgatttaaaagctacagaatgcactggcgcagaaaatggacgcctctggctatcgcgagaaggctccacagagcgtacaggaggaggacatgaggaagctcaccgctttgttggagcatctataggttatcagtgaagctgtgaagaaattagacgcgaactgagtttgacctctgattcnaagaggctctgcttgtaccgaagctgaccccatatttttcttgtttgcaaaaaagctcaattatgt

SEQ ID NO: 29487 - DNA, 282 bp, Zea mays
  Clone ID: LIB3180-047-P2-A3
ccacgccttccctcagcctcgcgtattgaaccctgcgtcgttgcggggaaaaaccgatttgaattgaaaatcattcggagacagagatcttttcttcctcgaagctatctggtttgttgattagatccatagctgctcgcgtcccttttcctcgctagctggcaagaggcggcgacgggacgaggttttcatcgcctctttgcgagcgacgatcacccactagtttgggcggtcagtggcacatgattgatgccaacgcgaagcttcacatgcttggcccct

SEQ ID NO: 29488 - DNA, 124 bp, Zea mays
  Clone ID: LIB3180-047-P2-A5
tttttcctcgcgtccgcccacgcgtccgcattcatgcagtccacgcacacccccgtctttgactcactccgcttccagatctaaggcgggccgaggaacgatgaacggaggcgccgtcccacca

SEQ ID NO: 29489 - DNA, 302 bp, Zea mays
  unsure at all n locations
  Clone ID: LIB3180-047-P2-A6
ttgtactatacgcaaattgcaccaagaaatccatcgagaggccgtcgacaggggaattaatggcgttctcttttatcagcagccaccgccgccttattctcgtagtcgccgtcctgctcttcttgcttgttgttgatagngtttgtactctttccttctttgtgcttgttttttctcttcccgngagatccctctttttactttcttttttccctatttttatctaatttttttcttttttctatttttttatttttttcctttctcactttttctttcttttattatttattttttctttt

SEQ ID NO: 29490 - DNA, 229 bp, Zea mays
  unsure at all n locations
  Clone ID: LIB3180-047-P2-A7
ttcgtctcttcaactagcaacatagaaagcacaatagtgtaccaacaatggcagccaaaatattttgcttccttatgctccttggtctttctgcaagtgttgctaccgcaaccattttcccacaatgctcacaagtctttatagcttcccttctttccccatacctattaccagcggtgtctncaatgtgtgaaaacctaattgttcaaccctactggatccaacaggc

SEQ ID NO: 29491 - DNA, 127 bp, Zea mays
  Clone ID: LIB3180-047-P2-A9
tgcgttcggggaaccaggaatcttacgcggaaccgcgccgcttccatggcgacggcatccactacgctgctcctctcccttgccttcctcgccttcgcctgggcggcgtcgccgtcgcctgatgcgg

SEQ ID NO: 29492 - DNA, 372 bp, Zea mays
  Clone ID: LIB3180-047-P2-B1
tcgagcagctcaacaccctcgaggtacctccattcgcagtcggccgtgtcctcggagccgcgggagatggcggatcaggagaccgtagctgtggttgaggcacctaccccggttcttggggaaccgatggacctgatgactgccctgcagctcgtcatgaagaagtcaggtgctcatgatggccttgtgaagggtcttcgtgaggctgccaaagccatcgagaagcatgccgctcagctctgcgtgcttgccgaggactgcgaccagcctgattatgtcaagctggtgaaggctctttgcgcttagcacaatgtccacctggttactgtgcctagcgccaaaactcttggagagtgggctgggctttgcaag

SEQ ID NO: 29493 - DNA, 325 bp, Zea mays
  Clone ID: LIB3180-047-P2-B10
cccacgcgtccggcccacccccacccgtcccgtgctagcttagctctcggctctcgccatggacgctgcggagaggaggctggctcgcgtcgctgcccacctcgttccgtccttcccggccccacacgccaccggacctcccctcgcgccttctcccgcggcagcgtcctcgtcgtcgtcctcgccggcgggggacagctacaggcgcgtgcacggcgacgtgccatcggagccaccggagtggcgcaccgccacagacgagtcagggaaggagttcgtcgacatcatctactagaaggccgtctgatagggcattgccaagatc

SEQ ID NO: 29494 - DNA, 98 bp, Zea mays
  Clone ID: LIB3180-047-P2-B11
tgtaagcccagcgagtacctgggcagctgggagcccgtagcggagccttgggaggtcttcacgcacgttgaccagatgagcatggcttacgcgagcga

SEQ ID NO: 29495 - DNA, 368 bp, Zea mays
  Clone ID: LIB3180-047-P2-B3
tcggggatgcaggaggtctctatcaagttggtcagtttcctcactggaacgtttggtcagagtggaatggaaaggccaacacttaggagtatgtttcaaacaatagcctcactgacaacattagtatcgcgataccgtgcgtcagttcatcaaaggcacagatggatttgctggtgcttttgctgaatgcctatgtggaagtccacagttataccaggcaggggggaggaagccttggcacagtatcaactttgtatgtgcacacgatggatttacactggctgatttggtcacatacaatagcaagtacaacttgtcaaatggtgaggacaacagagatggggaaaatcataatcttagctggaatt

SEQ ID NO: 29496 - DNA, 442 bp, Zea mays
  Clone ID: LIB3180-047-P2-B4
aatattttgagcattcagaaacacaccaagcgaagcgcactagcaacgacctaacaacaatggctaccaagatattagccctccttgcgcttcttgccctttttgtgagcgcaacaaatgcgttcattattccacaatgctcacttgctcctagtgccattattccacagttcctcccaccagttacttcaatgggcttcgaacacctagctgtgcaagccaacatgcaacaacaagcgcttgcggcgagcgtcttacaacaaccaattgcccaattgcaacaacaatccttgccacatctaacaatacaagccatcacaacgcaacagcaacaacagttcctaccagcactgagccacctagccatggtgaaccctgccgcctacttgcaagagcagctgcttgcatccaacccacttgctctggcgaacgtagttgcaaa

SEQ ID NO: 29497 - DNA, 279 bp, Zea mays
  Clone ID: LIB3180-047-P2-B5
ggttgggagaggaaaaggaaaagcgggtcgcgagtgccccccaccccccgcttttgctccaatcggcgccgcctcgcgcgagatccgctccgcgtgccccgccgccgcgctgctgccgagatagagggtgtcgtccccggcatcgggttccacggagagttgttgatttgggtacctgatccaattgggggtggattgagtcgcttgaccttttcaacatctgccccgttcctgctgctctggtcaccataggaggcttgcctggatccagcgatgatg

SEQ ID NO: 29498 - DNA, 218 bp, Zea mays
  unsure at all n locations
  Clone ID: LIB3180-047-P2-B6
ctgggtcttcagaccattagctttatctactccagagcgcagaagaacccgatcgacaccatgagggtgttgctcgttgccctcgctctcctggctctcgctgcgagcgccacctccacgcatacaagcggcggctgcggctgccagccaccggcgccggttcatctaccgccgccggngcatttgccacctgcggttcacctgccaccttcggtgca

SEQ ID NO: 29499 - DNA, 413 bp, Zea mays
  Clone ID: LIB3180-047-P2-B8
tcggaaggctctttgaggccttgctctcgcaatacaagctccgagggtgatgagcaacaaaagcggcctggtgatgtcaagttgtttggacagattctcagccatcagtcaaccctgcagagttctggcttgtcttgcaatggtaacaagagcaagcctccctcaccaaagatcgacacatctgtgagatccatgaacaatccaatggaccgtgtggtttgttcttccaggcctggcaccactccacatctgggtctggaggaaagattggcaaggtgctatggtcatctggatggtagcacggcacaacccgagccactgctcgtgatggcaaagcgccagcggtccttggccggcgtacagttttacttcgcttagaacggcacgcttggtgtgttaccagattaccaaca

SEQ ID NO: 29500 - DNA, 309 bp, Zea mays
  Clone ID: LIB3180-047-P2-B9
agctgagcttacaaccacgaagggtgtcactaccatcatcggcggcggcgactctgttgctgctgtcgagaaggctgggctggccgacaagatgagccacatttcgaccggcggcggtgcgagcttggaactcttggaaggcaagactctacctggtgtccttgccctcgatgacgcctagatccgctgctgctgctgctactcaggttctgccagctttgcgtgtcatcttgtttcggaccttggtgtagcactgcaaggctaaggtttactcctccgcacatggacttttggggataggcctgccac

SEQ ID NO: 29501 - DNA, 191 bp, Zea mays
  Clone ID: LIB3180-047-P2-C1
tctcctacgcgtccggtttgggatctggtatttctgtgttcattgctaccaatatctgtgagaatatcatctggaaggcatttagccccacaaccatcaacagtggtcgtggtgctgaattcgaaggggctgtcattgcactgttccatctgttgattacgtgaaccgataaagtgcgtgctcttcgcgag

SEQ ID NO: 29502 - DNA, 375 bp, Zea mays
  Clone ID: LIB3180-047-P2-C11
tctatcggtgatgttcgataatggtgtcacgattaatgacttatggtgctggggcgaaactgagagccccttgtgaatgtacacgcaaggttatgctgcttggcgcatgctggtaccgaggtctctggtcatgatccattgtggaactacactgatgtgtgatcttccgtggactcctcccttgaaacgatttttgtgttgtttgctgaaacaattaaataacatatgccatcactgttggatcaaaagagtatataactctgatgtattccttaagtaaaatttttaccagttcgtaagttttaaaaaatattaaacctatctgtatttaattgtgtggtatattctcccctttatttatgtatttttttcttt

SEQ ID NO: 29503 - DNA, 397 bp, Zea mays
  Clone ID: LIB3180-047-P2-C12
ggtgaagccgccgccgctgcagtgtccatagccaccgcaggagactgagatggggggttttgtcaagacccacaagagcaatgcgtacttcaagcgtttccaggtgaagttcaagagaaggcgcgctggcaagacagactacagggccaggataaggctgattaaccaagacaaaaacaagtacaatacacccaaatacagatttgttgtgcgatttaccaacaaggacatcacagcacaaatcatctctgctagtatagcaggtgatatggttcttgcttctgcttactcgcatgagttgccacgatatggtcttgaagttggtctgaccaactatgcagctgcctactgcactggccttctgttggctcgccgtgtgctcaagacccgtggttta

SEQ ID NO: 29504 - DNA, 259 bp, Zea mays
  Clone ID: LIB3180-047-P2-C2
tcgttcatttgtctcttgcgcctccattgcggcctctgtcccttgcacggtcaatcttacctccaaccatgggtaaagagaagtcccacataaacattgtggttattggccacgcagactttgaaggtgacctccacctaagacagcttatcgtacacgcattggcagcagttgtcaagcgtacgcacgagtggaaggagtacgactatggtacaatgaacatccaggtcatggagtacgcgtgggtgcacgacccgct

SEQ ID NO: 29505 - DNA, 381 bp, Zea mays
  Clone ID: LIB3180-047-P2-C3
tcgcggacgcgtgggttcaagtcctcctcctcccctggcttcttcttcttcttgctcctgctgctcctcttctttcttcctcctactcgatccgtctccactacctcgcacgtacggacggtacagcacaccacccctcatcaactgcccccggccccgaacccagagctagatctatatagcctgcagtcctggagcttgcgagcaaaggcatacgtacatacatacgcgttcgccgtgtcgggccgtacgtacgttgtcgtgcgatgggtgcggcgccggcggcgaggaggtgcgcgctgctcttggcgctggtggtgctggtcgcggccgcgggcgagcgcggtggcagtggtgccggcggtgaagcgggggcggagc

SEQ ID NO: 29506 - DNA, 406 bp, Zea mays
  Clone ID: LIB3180-047-P2-C4
atatactggctaactcggactgcaaactgaaaatatgtgactttggtcttgcccgtgcatcatttaatgatgccccttcagctatattttggacagattatgtggcaacgaggtggtaccgggcacctgaactatgtggttcttttttctccaaatacactcctgcaattgatatttggagcattgggtgcatatttgctgaacttctcactggaaggccactatttcctgggaagaatgttgtacaccaattagatattataacagatctttttggaacttcatcatttgagaccttatctcggatccgaaatgagaaggcctggagatacttaagctgtatgcggaaaaaatatcccgtgccctttactcataaatttcgaaatgccgatcctttggctttttg

SEQ ID NO: 29507 - DNA, 106 bp, Zea mays
  Clone ID: LIB3180-047-P2-C5
tccattccgtgccaccgccgccgcgctgcgtctgcgtctgagtgcgtcggcggcgcgcccaccctaaatgtccccagccagagccagagccagtgaacgcgctttt

SEQ ID NO: 29508 - DNA, 343 bp, Zea mays
  Clone ID: LIB3180-047-P2-C6
aaaatatcttcaggttaggtatccagaccgtattaccttaatacgaggaaaccatgagagcagacagatcacacaggtttatggattctatgatgagtgccttcgcaaatatggctcagtcaatgtctggagatattgcactgatatattcgactatttaaggcaatcttcttttgatacttcttttaatccaagcaattccatctttcattaaattagatatatgaaatctgtaagcagctctatctgttttttcagtttgtctgcacttattgagaacaaaattttagtgtccatggaggcctttcttctgctatcacgacactggatcaggcaaaactat

SEQ ID NO: 29509 - DNA, 316 bp, Zea mays
  unsure at all n locations
  Clone ID: LIB3180-047-P2-C7
tctgcagaaggggtgaaccatctggtgattttttccggtcatttttagtggaggacaaggcgcctggcgtcttctcctacgtcgagttccttgtgcatgtccacaggcaaatccaaagcaagatgacctgagggcccaagatcctggttgtaacatttcggttcagtagatggattgtntgtaccccgggagtttgatttctgcataaggagacagcaaagtggcgattccatatcaatgtggagcataaagagtgctcggataatagaactcaggaatagaggcttgtggtgttacagcaccgtttttggagtgg

SEQ ID NO: 29510 - DNA, 379 bp, Zea mays
  Clone ID: LIB3180-047-P2-C8
tccatctccatttccggctttccgccaccaccccccctctctctctctcttcttcttcttcaatcctccctcctcgcgctggagttggagggagaggggacaagctttccggcgccgacgccgacgcggacccggcgccgacacgatccggtggatcaagtgcatcacacctttagggaggccccttggacagcagtttgtgctgcaaattctatatagctctgtcgcagcatggcctcggtgggcgtggcacgctcttctttgggatttcagaatggcacaagttctagcagtgacccagatcgtcttcccaacgagttgggcagtatgagcataagggacgacaaggacgttgaagatattgaggcaatggcaatgg

SEQ ID NO: 29511 - DNA, 236 bp, Zea mays
  Clone ID: LIB3180-047-P2-D10
tctttctcttttcagcttgctcatgcatccttccgtctatattgtgtaagaaacagtcatgtgcaaagtgttaagcttggtccgcgtctccttggggatgctccaaaaataaatataagtccacctgagacagaaatggtcgatgaagaaggttcatgtgatgtgaccccggctttgaacttgtatgttgaagaaatcaacatgaaattactcttatgtggcgtgccgtgcaccat

SEQ ID NO: 29512 - DNA, 317 bp, Zea mays
  unsure at all n locations
  Clone ID: LIB3180-047-P2-D11
tctgtctcaggtgactatctcttgttccctgggggtgggactcagttcaagaatggtgccctccactatattgatactattcagcaggcactacctgatattgcatggggcaaacgaagccgtgtcatattggatgttggttgtggagttgccagctttggaggctacatgtnngntngagatgcgcttaccatgtcttttgctccaaaagatgagcattaagctcaagtacaatttgcattagaaaggggaattccagcaatatcagctgtgattgggcaccaaatagactttctttctcctattatagtcttttg

SEQ ID NO: 29513 - DNA, 182 bp, Zea mays
  Clone ID: LIB3180-047-P2-D12
tctgttttatgaggggatcatcagattgggcttattattccttattactccaggcaaggatcggagttgctctgaattgactgaaccatggcggcgacaatggcagtgacgaccatggtgacgaggagcaaggagagctggtcgtcattgcaggtcccggcggtggcattcccttggaagcc

SEQ ID NO: 29514 - DNA, 310 bp, Zea mays
  Clone ID: LIB3180-047-P2-D2
tcgattttactgcttgctccctgttgaccattgggtattctgaaccatcgagccatggctgccaagctgactcgcctccacagtcttcgcgaacgccttggtgccaccttctcctcccatcccaatgaactgatagcactcttttccaggtatgttcaccagggcaagggaatgcttcagcgccatcagctgcttgcggagtttgatgccctgtttgatagtgacaaggagaagtatgcaccctttgaagacattcttcgtgctgctcaagaagcaattgtgctccccccatgggttgcacttgctatta

SEQ ID NO: 29515 - DNA, 300 bp, Zea mays
  Clone ID: LIB3180-047-P2-D3
tcgcgtatccacgccccacgcccccacaccaagccgtatcgtcttctccctcttgtccggttcgggtggtccgcggtcggggtgagtgagtgagcagctttgcttctccatctccccattcccttcccacccccggcccggcggcggtacgtgaccctgacgccgcagcgctagctagctcgccggaacggcaggtggcggcgcgcgacctgagagcacagcagcaccggaccggctcaggcaggcgaccggcagaaaagatggcgggagcagcagctgtggagacggcggcggcggcgg

SEQ ID NO: 29516 - DNA, 232 bp, Zea mays
  Clone ID: LIB3180-047-P2-D4
ccagtagcccaccagcctacccgtcgacgctaaccgacgcaatggcgacgctcaccgttccttcctccgtcccggccgtcgccgaggactgcgagcagctccacaaggccttcgaaggttggggcaccaacgagaaactgatcatctccatcctggcccacctgaacgccgtgcagcgccgcgcgatccgccgcggctatgccgaggcgtacgggaaggagcttcttcgtgc

SEQ ID NO: 29517 - DNA, 255 bp, Zea mays
  Clone ID: LIB3180-047-P2-D5
tctaatacatccacgaaccaatttctcagtaaccagtacccactacctgtgaggggtctaaggaagtatcaatgttttttgttcctagagcactatataccgaaaccaaaggggccatccatcgccatcgacctgggaacagcctcctaaggtgagcatgtacgacattctcgatcgaggaccggtaagtgctaacgcccagccataccgtaccactcctaactaccctggcttcaccgacacctagcggttcat

SEQ ID NO: 29518 - DNA, 283 bp, Zea mays
  Clone ID: LIB3180-047-P2-D7
tcgccgagcttaaggtcgcttaccggaagctcgccaagaaatggcacccggacaaatgctcgtcctccagcagcgtgaagcacatggaggaagccaaggagaagttccaagagatccagggcgcctattccggtctcaatcttccttctctcagcacccttacacaatacacccgcctcactgctctgttccatccatattcgcaaaccaccccttcacctgtggcaactactgaccaacgacaactgataaactgaacagcagcaaacggaaccgatctagc

SEQ ID NO: 29519 - DNA, 440 bp, Zea mays
  Clone ID: LIB3180-047-P2-D8
tcgggccccggcagtctcccacagacggcgctcatcccccacatggattaggaaattagcaacattaggggaaaggccatcaaagatgcatctgttccggtgattccacaaaatccaagcgcccagcataatgagggagtttaggccatctctgaaggacccctgaatagcttcatttgcttgatgccaccactccataaaattaatattcgttggttggggggccaaaccctgcagcccgaattgccttagaaggaggaaccaacactctcttgagaaaacgcaattcacaagcagatggtcaattgtctccctttcctgctcacataaaggacatttttccggatgatccagcccccgcttctcaagtctatctgctgtccaacatttcttgtgagccaccagccacaagaagaatcgacatttgggcggagcccaag

SEQ ID NO: 29520 - DNA, 359 bp, Zea mays
  Clone ID: LIB3180-047-P2-D9
tcggacgcgttttatgaaaaccgtggggaggtgacaacaccgaccgtagtacacctgcccagcctgtacagtactgtgcctccggcgtgccaaatacgttactcggctggctgccccgcaggcaaagctcaccgcgccggcgtcaaggtcactagcaacatcgcgcccgatctggacatgctcatcgtcaaggccaccagccacgactacgagtcggccggggagcgccacatccgcgagatcctccaccttacgtccggatcccgcgcccacgttgctgctgccgtggcagggtgctcccgcaggctctcccggacccgggactatgtgggcgcgctcaagtcgttcatgctcgtgca

SEQ ID NO: 29521 - DNA, 352 bp, Zea mays
  unsure at all n locations
  Clone ID: LIB3180-047-P2-E10
ttaagaagttagtgttctcatcatcagctgcagtttatgggtcacctaagaactcaccctgcactgaagattttcctctcactccacataacccatatggcagaaccaaacttatggcagaggagatatgccgtgatatctaccattcagatcctgaatggaatatcatttngcttaggtactttaatccagttggggctcaccccagaggataccttggtgaagacccatgtggaacttctaacaaccttatgccctttcgtcagcaaatttgcagtggcaggaggccatcgctaacaatattttggaaataacttcgcatcaaaggatgggacaggggttcgtgattatt

SEQ ID NO: 29522 - DNA, 102 bp, Zea mays
  Clone ID: LIB3180-047-P2-E11
tgagcaaacgcaccgggtcgagccagtccaccacccagccatgcctgggaggggcaagtcctcggcgacgattgcccctgcggcggggtccccgaggaagac

SEQ ID NO: 29523 - DNA, 92 bp, Zea mays
  Clone ID: LIB3180-047-P2-E12
tcttctaacgacccggccacactcgtgtcgcaggaccgtgcaaggcctgatccgctgtgtccgctgaccgcgttctcccccggcggggagag

SEQ ID NO: 29524 - DNA, 289 bp, Zea mays
  unsure at all n locations
  Clone ID: LIB3180-047-P2-E2
ttgactggtacaagggcccaaccctacttgaggctctggacttgatcaatgagccaaagaggccttcagacaagcccctgcgtctcccccttcaggatgtgtacaagattggtggtattggaactgtccctgttggacgtgttgagactggtgtcattaagcctggtatggttngtacttnngtgcctactggtcttactactgagtgtatagtcagtgagaatcactttttaggttcttcagtaggcccttccttgtaacaattttatatttaatctctaatatattt

SEQ ID NO: 29525 - DNA, 254 bp, Zea mays
  Clone ID: LIB3180-047-P2-E3
ggcgaggcaaaagcattgcgaccacagacagcgcgcgcttcaaggccttttttttttgagataacaaggaggagaggaggagatggcggtcacgatcacgtgggtgaaggcgaggcagatcttcgacagccgcggcaaccccaccgtcgaggtggacgtgggccttagcgacggcagctacgcgaggggggccgtacccagcggcgcatccactggaatatatgaggccttggagttgagggatggaggatctt

SEQ ID NO: 29526 - DNA, 415 bp, Zea mays
  Clone ID: LIB3180-047-P2-E4
ttgagtatcttgaaaattcactgcagaaggcacaagaaaactttattaagagccagattgagatgttacaaatccgactgcaaatggtgcagcgtggcactgctgggttgagcagtagcgagtacactgagcacacagaagactgactgaatctgtaaacaggcactcctgcatcgtggagtaataatgagaatactgagcacacgcagctgaatctgtaaataggcggagatgaggatggggataaaagaaaacattcaaagaattggctatacctgggggaaactgaagttttgcctggattttggcttgctagttgttttgctttcctgatattatgttagtgtcttttgccattcataaatatttacttatctttggtagttattatttcagttattatttttatattttt

SEQ ID NO: 29527 - DNA, 223 bp, Zea mays
  Clone ID: LIB3180-047-P2-E5
tcggcttgtttgctctagggtttttgccacgccgccgccgctctgccccttggacccgaccgatataccaagatgacggcgcaggctgcggaggagctcgccgcccagatcgagcagcagaagctcgaggagcagaagaccgaggcagaagaggttgtggtggaggaggatgactaggatgataaggttggcaaatatgacagccttgatcttttttttttaa

SEQ ID NO: 29528 - DNA, 292 bp, Zea mays
  Clone ID: LIB3180-047-P2-E6
tttatctaatgaggctcaacagaaaccgttgctcttgaagcaaagtattaagctcttagaaagtttggattcatgttggagtgatgaggtccttgtattctctcactgcgataaatcccgctgtctgttcttgcagcttatttcaaggtatacaacatgatttttatgaggtttttctggacttaatgttttttgtatatataccttttatatccttttactctttattgttacttttttttcttattgcacattttctctttcttacttatgttgtgcttatttctttttt

SEQ ID NO: 29529 - DNA, 382 bp, Zea mays
  unsure at all n locations
  Clone ID: LIB3180-047-P2-E7
tttttaccattcagccagctatctgctgcctacccccagcaatttcttgcattcaaccaactgacagcattgaactctcctgcttatttacagcagcaacaactactaccattcagccagctagttggtgtgagccctgctaccttcttgacacaaccacagttgttgccgttctaccancacgctgcgcctaacgctggcaccctcttacaactgcaacaattgctgccattcaaccaacttgctttgacaaacccagcagcattctaccaacaacccatcattggtggtgccctcttttagatttcttatgagttataggtcaataataaagttttttgtctgatgtttggggcttcccaagaaaaagaaaggtcttttt

SEQ ID NO: 29530 - DNA, 371 bp, Zea mays
  Clone ID: LIB3180-047-P2-E8
tcgcacacatcacgtaaagcgcaaccaaatgatttccaccaccgtcgctgctcaccccgccaccgtcacagcgctgcggcgaaggtacccgcttcgccctcgccagccactctgtgctccaatcttcacggcggcgacgaggcagtgcatggctacggcgaagccctcggtcacaaacgcgctcgctaacctatccgttgagagcgcccccgcggcgcttcccaagctttcggtcccgatactggtgaatagttgcactgggaaaatggggaaggctgttgcttgagcaacttgtctcggctggtctttcagttagttcctgtattaatttagtggccattgtggtcccctgattgtaaggattgaaaatt

SEQ ID NO: 29531 - DNA, 117 bp, Zea mays
  Clone ID: LIB3180-047-P2-E9
tctttttcacaaaccctagcagccactagggtttgtccgctcccacccgggcggctgcctctctcctccgatgggcaagtcaagcaagaaggcggtcgccgtggctgcggttccagc

SEQ ID NO: 29532 - DNA, 377 bp, Zea mays
  Clone ID: LIB3180-047-P2-F1
ttagctacatgaataatccccaaaaccctaaagccagtgctccttgcaccttgccatcggagcttcccaaagaagcagtggcgaccgacgaagcaccgccgccaatgggcaacaacaacaacaacacggaatcagtgacggcgacgatggtccgagagcaggaccggctgatgcccgtggccaacgtgtcccgcatcatgcgccaagtgctgcctccgtacgccaagatctccgacgacgccaaggaggtgatccaggagtgcgtgtcggagttcatcagcttcgtcaccggcgaggcgaacgagcggtgccacaccgagcgccccaagaccgtcaccttcgaggacatcgtgggggccatgagccgtcttggcttc

SEQ ID NO: 29533 - DNA, 371 bp, Zea mays
  Clone ID: LIB3180-047-P2-F10
ggggagtggacacactcccaacaacagcagaagctggattaacgggaggtctgatttgggtgctgcgaattctacagataatcgatggaaaggagctcctgaatgtctgcagtgcagctaaagattggggagtggacacactcccaacaacagcagaagctggattaacgggaggtctgatttgggtgctgcgaattctacagataatcgatggaaaggagcttctgaatgagaggacgaacaccgagaattggtaccttgagaagaaaccaggctcatggaggctagcttgccagactattgtaggcaacaaagagaactctggcatggtttgtcgccaaccgctgccccagtggaagagatgtccgtgc

SEQ ID NO: 29534 - DNA, 310 bp, Zea mays
  Clone ID: LIB3180-047-P2-F11
aaaaccctagcagccactagggtttctccgatcccacccggcctcctccgtctcttctccgacgggcaagtcaagcaagaaggcggccgccgtggctgcggagccagcggcggtgcccaaggggaagaaacgggaggcggacgaagagatcgcgaaggccgtgagcgccaagaagccgaaggcggcgccaccggcgaaggccgtgccgacgttcaagaaggacgccaagatgctcacgttgcagcctccccacaagaaggctgagagcacaagcagctactttgaagtggactcccagtcctaaaaggag

SEQ ID NO: 29535 - DNA, 229 bp, Zea mays
  Clone ID: LIB3180-047-P2-F12
tcgccacactcgagagccatctcccagcacacgagcgcgatggcttccaccaccaccaccaccttcctcgccatcttgctagtcgtggcagcttcggcggcgccggcacggtcctgctcaccgcgcgacatccacgcgctgctgagcgtgaagcaggcgctgggcaacccggcgtcgctgtcgacgtggacgccgccgtatgccaactggtgtgcgagggaccacctac

SEQ ID NO: 29536 - DNA, 315 bp, Zea mays
  Clone ID: LIB3180-047-P2-F2
cgagcagataaaaagagccgaagcagcgccaccaccacgtgcctggctggtcagcttgcctgcctcactgcacccggccacaagggcaagatgcccgcctctgtcgctgtctacccggccaagatggcatgctgtctccagctccaccatctttgtcgggcggaccctggtccactccctgctcgggacctctttctcctgttgaccccgcgcctgcgccccgtcagagcttttcccggaccggtcccggccaactccttcggttggctggaccttcgactccgacagagcggatgaacagtccgacaaaaatac

SEQ ID NO: 29537 - DNA, 301 bp, Zea mays
  Clone ID: LIB3180-047-P2-F3
aaccgactagtatagggagagctgctgcgcgtgcaggtcccgaattgcagtttcgggctacgacccacgcgttctgcatactagaacagtctagattgaaggtggacaaattcctattccaactgggacaaggtcggctcaccggctgagacggggacaattttgccgttcttagcgccgggtggtatcatgcgacagggcttgaatctgctatggatcaccccagtctacaagctgagatcggctgcatgtttgaagtttgatttatacattcaacatcgctttacgttgaaacccattc

SEQ ID NO: 29538 - DNA, 303 bp, Zea mays
  unsure at all n locations
  Clone ID: LIB3180-047-P2-F4
tcgaccgtattcaagaggttccatggagtcgccgagaacccgacggagaggatcgtgcgcggtctccatccattcatggagacgagagggttgcccaagggccttgttctcgggagctgtaccgttcttgatgccgccgggcagggcgcgcttggcccgctttatgaactgctggagtcnaccgtctccggccgggaacgtcaggagcgagtaattctgttccattttggcgccaacagtggttcacataggtttgcttttgaaaattaagctgttattgaagctactttcctttgcccttga

SEQ ID NO: 29539 - DNA, 106 bp, Zea mays
  Clone ID: LIB3180-047-P2-F5
tcttttctattgatcggactcactccaccggtgcccagttcttgtatgaatgggagggcggacttcacaggaagcctagagggccaataaggcaaggcatgagctt

SEQ ID NO: 29540 - DNA, 293 bp, Zea mays
  Clone ID: LIB3180-047-P2-F7
atttagcaccaggcaaaccaaacactaggccaacgcaattctctagagcactgcaggctctagttcttcagaggcccgccacaaccacaagccaaggccacagccagtgccctcgtcatggctcccaacctgagcaagaagacgcctgctggcctcctcggcgacaaggtggccccggtggagggactcaagccgccacggtcacccttaacggcaaggacacggcaccgggctcaccaccacgactgctggacacgggacccgacatcaccgtcgtcaccgtgacaagggct

SEQ ID NO: 29541 - DNA, 435 bp, Zea mays
  Clone ID: LIB3180-047-P2-F8
gcacaatagtgtaccaacaatggcagccaaaatattttgcctccttatgctccttggtctttctgcaagtgctgctacggcgaccattttcccgcaatgctcgcaagctcctatagcttcccttcttcccccgtacctctcaccagcggtgtcttcggtatgtgaaaacccaattcttcaaccctacaggatccaacaggcaatcgcagctggcatcttacctttatcacccttgttcctccaacaatcatcagccctattacaacagttacctttggtgcatttattggcacaaaacatcaaggcacaacaactacaacaacttgtgctagcaaaccttgctgcctactctcagcaacagcagtttcttccattcaaccaactaggttcattgaactctgcttcttatttgcaacaacaacaactaccatttag

SEQ ID NO: 29542 - DNA, 254 bp, Zea mays
  Clone ID: LIB3180-047-P2-F9
tcggaatacttgtacaatctatctgaaatgttcacaaaattctataccaactgtcaggtggtcgggtcaccggaggagacgagccgactgttgctttgccaagcgactgctgttgtcatgcgacagtgcttcaatctgctagggatcaccccagtctacaagctgtgatcggctgcatgtttgaagtttgatttatacattcaacatcgctttacgtagaaacccattcatcatggttgcagttttggccttgt

SEQ ID NO: 29543 - DNA, 118 bp, Zea mays
  Clone ID: LIB3180-047-P2-G1
tatcgcgagcggccagcccttttttatttcaaggaagtgaggtacactgcacggtctattacaccttctgcttatatgaaaaggcactcaaaggtcgccaacttcaaagagactcatt

SEQ ID NO: 29544 - DNA, 294 bp, Zea mays
  unsure at all n locations
  Clone ID: LIB3180-047-P2-G10
attccgaggccacgacccacgcgttctttggacactacatccttaaagactgggtggcatatacccaaggcaaagccgtgcgcactctcactgacgacacatgcaccaccaacagaagcacggagcactcgagctctgtcggctttaagcttgcactagcaaagattttaccaaggttgattacaggcctgaaggagcangnnnccgattgcgaccaatacgagcaccttggcaaaacagaccccgttagagagagctgatcattgagtgacttgtacttggatcttttgcctt

SEQ ID NO: 29545 - DNA, 239 bp, Zea mays
  unsure at all n locations
  Clone ID: LIB3180-047-P2-G11
gaagatcttatctactatgtgcttgaggataatatattctattgggggcacagggcattgcatacgaaatggctatacaaacacgttcacagcgtccaccatgagtacagcacaccctttgtgtttaacatcggaatatgcccacccagcttgaattttgttcctgggattcnccacagttgatggtcctgctcttactggccctcatttcttcaccctgtggctgtggatggtgttga

SEQ ID NO: 29546 - DNA, 114 bp, Zea mays
  Clone ID: LIB3180-047-P2-G2
tgtcttttcagaccattagttttatttactgcagggcgcataagaacccggtcgacaccatgagggttttgctagatggccttcttatcctgcatctcgttttatgctcattct

SEQ ID NO: 29547 - DNA, 276 bp, Zea mays
  unsure at all n locations
  Clone ID: LIB3180-047-P2-G3
ctcaagaccttgactgcttcagatacaagggcccatggtggattgtgtgtggtcatgaggcattctttagaatgtttgtctcaactggacatgtcttataattcaccatgnattgatctggtttttataggatctttatggaaatgattggcatttatgtcacattttttgaggcccacctagggtgcatgtactttattacaggttgaagttgttattatagtttttttttttccctcgcttggggacgtgtttttatttttattagtggttgtc

SEQ ID NO: 29548 - DNA, 333 bp, Zea mays
  unsure at all n locations
  Clone ID: LIB3180-047-P2-G4
ttttctttttcccaggcaggcaggtcggcgaggagggcaggaagaccgaagaccgagccgtgcgggggctcttnactgtaacttgacagtaccctatattctcatatcctttttgtctgtctttttttttttttttttntgttattattttgtccattgttattttaccttattctttttttttttattatgtgttttttttttattttatttagtttttgtttttattatcttttttgtttttaagtttttattgtttttttatcattttctcatatctgtttatgtttttttattttgtcttttaaattatatattttcttttattttata

SEQ ID NO: 29549 - DNA, 106 bp, Zea mays
  Clone ID: LIB3180-047-P2-G5
cgatgcagtttattggtgtgcaaatcattcagaatgctttgaagacacctgtacacacaattgcctccaatgctggggtggagggagcagttcttgtatgaaagct

SEQ ID NO: 29550 - DNA, 309 bp, Zea mays
  Clone ID: LIB3180-047-P2-G6
tcggttgtatctcaagttcttttctactttgtccttgaggattttatattctattgggggcacagggcattgcatacgaaatggctatacaaacacgttcacagcgtccaccatgagtacgccacaccctttggttgaacatcggaatatgcccacccagctgaaattttgttcctgggattcgccacaattgttggtcctgctcttactggccctcatctcttcaccctgtggctgtggatggtgttgagggttttggagacagtcaagcttactgctgctttcattttctatggagcccatcaaatt

SEQ ID NO: 29551 - DNA, 296 bp, Zea mays
  Clone ID: LIB3180-047-P2-G7
tcggggcgacaacatgattgagaggtccaccaaccttgactggtacaaaggcccaaccctgcttgaggctcttgaccagatcactgagcccaagaggccttcggacaagcccctgcgtctgcccctccaggatgtgtacaagattggtggtattggaactgtaccggttggtcgtgtggagactggtgtcatcaagcctggtatggtagtcacctttggtccaactggcctgactaccgaggtgaagtttgtttagatgcaccacgaggcactttatgaggctctttcgggtgaca

SEQ ID NO: 29552 - DNA, 267 bp, Zea mays
  Clone ID: LIB3180-047-P2-G8
gaggcaggggcgcagttgctgaagccgccacttcacctcgactccatacagaaatggcctattcttgcgcctacacactcccttcactttccttcgtttcctcctccagttcatctccgccgattcaggcgctctggtgtggtggccatggcacagcgttgggcagaaggtgtatgcccccggcgtggcggggtccaaggacaatggcggtctgccgaaaatccacctgaaatacacccacgggagcaaggcttagatttatctgtt

SEQ ID NO: 29553 - DNA, 139 bp, Zea mays
  Clone ID: LIB3180-047-P2-G9
tcgcgccgcgccgctcgcgtcgggatcccgccgccgccctactcggtcgaccatggggacggcgacgatggcgactgcggtgggcgcggccatgctgctctacttcgtgctgagccggctgctgttggtcgaggacgtc

SEQ ID NO: 29554 - DNA, 271 bp, Zea mays
  Clone ID: LIB3180-047-P2-H1
ttttccattcgtccgcgcagtcggctgtcgcagactggtagtagccggagcgccgtgaccgtatccttagatcagcggagagccgataccacaccactctactgacgcccgacgagcagtgtaacattttccttcagccatgggtaaggagaagacttacatcaacattgcggtgatttgccatgtccactctggcaagctgatcaccacttgccacctgatctacaagcttggagggattgtcaagcgagtgatcgagagtgccgagaaa

SEQ ID NO: 29555 - DNA, 110 bp, Zea mays
  Clone ID: LIB3180-047-P2-H2
tctaccttcaccaagtgccgcgccgcggtgcggaggctcatggactccaacggcgtctccgctttcgacgtcctgctccacgacgggtcgcccaacgtcggtggtgcctg

SEQ ID NO: 29556 - DNA, 246 bp, Zea mays
  Clone ID: LIB3180-047-P2-H3
acagaagaagggcgcaaaagacatgaaggccatgaggagagctgagaaggaacgcctgaaggaaggtgaggctgctgatgaggagcagaagaaactgaagaaggatgcaaagaagaagggttccaaggattccactgctaagggtttgaagaagaaggctactactgctactggctctgatgaggaccactcaatctcttcaactggcagtcatgatggtgacaaagcagctgcagatgatgatga

SEQ ID NO: 29557 - DNA, 223 bp, Zea mays
  Clone ID: LIB3180-047-P2-H4
tctcgttggagagggagacagaggagaggaggagcagcgtggcgacgcccagatcgagcgacctgatcgagtccccttgccccaacttactgaatcccaatccgagcccgccaattgggctccccgaccacgccaagttgaagcgagctcgaaggcgtatgttcaagagatgactgatgagggatgctagtgacattgatgaacttgttacgggcgtgctggc

SEQ ID NO: 29558 - DNA, 319 bp, Zea mays
  unsure at all n locations
  Clone ID: LIB3180-047-P2-H5
tcggcgtatatagagtagcagcagcaggcggcgccgagtagcggctccccacctcgagcttgccaccatggctagaggattgaagaagcatttgaagaggctcaatgcgcccaagcattggatgctgtacaagcttgtcggtgcttttgctcccaagccatcttttggacctcacaagtttagggngtgcctgccactgatcctcatcatcaggaacaggctcaagtatgctcttacataccgttaggtcatattcattctgatgcaacgccatgtacttgttgatggcatggtcaggacatacatgacctacccttct

SEQ ID NO: 29559 - DNA, 103 bp, Zea mays
  Clone ID: LIB3180-047-P2-H6
ttggttctatctcttgttcacgcgacgacctgagcagatataaaccatcacgattcgttgtgcaggttataaggttgacgaacacgagcgtgatatcacgcca

SEQ ID NO: 29560 - DNA, 250 bp, Zea mays
  Clone ID: LIB3180-047-P2-H7
gcttgattgtgatgcacgattgatcatggcatgccatggtaatatgcgattgtactactctgctcatggaaaaatcgtgcatttgtattgcatatgactccacttgtagtatctattacagcagaacaaaggatgtatttatatatattccgtttttcccctttggagagaaggaatcaattgtgatagcagtgatagaattcggacgggaattctgtctcaaaattatattaatatgagctagtttggg

SEQ ID NO: 29561 - DNA, 327 bp, Zea mays
  Clone ID: LIB3180-047-P2-H8
tttttcacctcgctgcggtttacctctccctttctctcaccttcctcgcccacctccatcgcctcgtccttaagcaaacgacgcggcgagcgacccgcgaccctaaccctagacagagagagaccagcagctgggccgaccgcacgcacgcgcacccactcagcggcgcaatggcggggcgccccctcacctctcgctcgtcggcggcggccggccgggatgcgtgagatcgcggcgccggatggggaaggatgccggcgaggcgcagcagccgctggacggtgcgtgcggttgctcattctgtggcccatgatgaagcttgttctt

SEQ ID NO: 29562 - DNA, 382 bp, Zea mays
  unsure at all n locations
  Clone ID: LIB3180-047-P2-H9
tcgccagaacagaagaagggcggaaaagacaagaaggccatgaggagagctgagaaggaacgcctgaaggaaggtgaggctgctgatgaggagcagaagaaactgaagaaggatgcaaagaagaagggttccaaggattccactgctaagggtttgaagaagaaggctactactgctactggctctgatgaggaccactcatcctctccaactcgcagccatgatggtgacaaagcagctgcagatgatgatgacgatgatgtccagtggcagactgacactttaattgaggctgtgaagcagcncatgcaagagcagctgagtgcagcaactgctgaaatggtgatgcttgttactgaggtgactgagatgaagatgaatc

SEQ ID NO: 29563 - DNA, 287 bp, Zea mays
  Clone ID: LIB3180-048-P2-A1
ttgcttttgttgaagaggaaaatgcaccaggtgaagagcctgttctggtacggcctggtactgaagttgtttcacctcccaagaccgaggtggccgatactgttgacatactgggcttaaatgatccaaatcctgttgtatcagctatagaggaaagcaacgctcttgccttggctattgttccaacagatggtgctttcacaactggtaacactgcatttcaagataaggggtttgatcctacaggatgggaactcttccttgttactgcacctagcaacacgact

SEQ ID NO: 29564 - DNA, 433 bp, Zea mays
  Clone ID: LIB3180-048-P2-A10
tcgcagacttctgctgcagcgcctccgccgccgctgccgcatctaacgcagttccctccgccgcagcccgaggcaagatggttctccagaacgacattgatctgctcaacccgccggcagaactcgagaagctcaagcacaagaaaaagagactcgtccagtcgcccaactccttcttcatggatgttaagtgccaggggtgcttcagcataaccactgttttcagccactcccagactgttgttgtgtgccctggctgccaaactgtcctctgccaacccacaggaggaaaggcaaggctcactgagggctgttctttccgcaggaagggagactagagcggatgtggtcttcaagttttgctctatgccagatactagcgtcatgaactgcctttagctaagattttccataagttgttctcgagcagcta

SEQ ID NO: 29565 - DNA, 322 bp, Zea mays
  Clone ID: LIB3180-048-P2-A11
tcgagtaccagcactggtacaaggacatgaggcacagcacgaaggtgaaggacgcggagggccagccagcgttcgcgctcatcaacagggccaccggcctcgccatcaagcactcgctcggccagtcccatcccgtgaagctggtgccctacaacgcggagtacctggacgagtcggtgctgtggacggagagccacgacgtgggcaagggcttccgctgcatccgcatggtcaacaacatccaccttaacttcgacgccttccacggcgacaaggaccactgcggcgtgcacgactgcaccaccgttgtgctctgttagtg

SEQ ID NO: 29566 - DNA, 211 bp, Zea mays
  Clone ID: LIB3180-048-P2-A12
tcgcaaaatctctccttagtttccccaacctgcttctgtttaccgaagggctaaatccaatccccttgccaagctctctctttgctgcgggaggtcgaggccggagaggtcttctgggatgggatcaagaaaggggtggttccccgtggccctcctgctgttggccgactctgccctctggccgccggtcgccgccgtcgtcgtcggaggc

SEQ ID NO: 29567 - DNA, 285 bp, Zea mays
  Clone ID: LIB3180-048-P2-A2
tcgccttctcgtcgaagccgttcgtggctgtgctggtggccttcttactggacaacgcgatccaggtgcgtgacagcggcgtgaggagggacaggggctaccactggtgggacaagttccggagcttcaagacggacagccgcagcgaggagttctactcgctgcccttcaacctcaacaaggttttcccttccgtctgatcctgcagggtctgcacactttttctcgcagtcgcagttgccctgactggagtcaggcaagaaatgatcctatgcaaatgatgct

SEQ ID NO: 29568 - DNA, 93 bp, Zea mays
  Clone ID: LIB3180-048-P2-A4
ttggtttggtgtcggtttctactcggcatacctgggtgttgagagggtaggggggggcaccaagcacaacgatatgaggaggatgttgtgagt

SEQ ID NO: 29569 - DNA, 181 bp, Zea mays
  Clone ID: LIB3180-048-P2-A5
ctctgggattcaatgaaacaaatcagccccatttttcattgaatcccagagttcatacaacgacccatcaggtgaaagtaagatggcgcgtgctaacaggtcaggtgagaggagtgatactaaacaaaatggggctgatttgtttcaaaaaaaaaaaaaaaaaaaaaaaataattattaat

SEQ ID NO: 29570 - DNA, 193 bp, Zea mays
  Clone ID: LIB3180-048-P2-A6
tttgctttccggcctcccctacccccctcatgcgccgcaagaagcacttggaccggggtgggggcggcgttggaggtttcactgttctcttcatctgctttacctcgcgttgctccgctgtcttagccatttgcgttgtctgcttgtgcgtgctattttttcttttcgtcctacagtttctttaagtttctta

SEQ ID NO: 29571 - DNA, 311 bp, Zea mays
  Clone ID: LIB3180-048-P2-A7
tcggtctcctttaccccactggctggcgagcagcaaactccaggtgcagagcggacaagttcctcacgagcgcagggaacaacagatgggatccgtattttaaggattgtattggagctattgatggtacacatgtaagagccactgttcctagagatatggagcatgcctttcgtggtaggaagtcctatgcgactcaaaatgtaatggtgggtgtagattttgatctacgctttacttatttgttggctggttgggagggaacaactcatgatgcttatgttttatgagatgctttagaacgtgtgaat

SEQ ID NO: 29572 - DNA, 261 bp, Zea mays
  Clone ID: LIB3180-048-P2-A8
tcgcagcaagcagccgttcccccaaaaaaggccagagctcagcagagccccgcgggccgcacccaccagaaaccccagtcgatcggcggcggcgatgtcgctgtcctcggtgaagatcggcgaggaggtttggctcacatgcctctcccacgccctcactaccgagaccgaggaggtcatgggcctacttctcggcgacatcgagctattcagcaagggcgccaccgcccttatatggggagcgttttcgcagattgaggt

SEQ ID NO: 29573 - DNA, 221 bp, Zea mays
  Clone ID: LIB3180-048-P2-A9
tcgcctcactctcgttccatttccccatctcccagatccaattcgcgagttcttcctcctctgccgccatggcgctctctgtggagaagacctcgtctggacgggagtacaaggtcaaggatctctcgcaggcggacttcggtcgcctcgagattgagctggccgaggtcgaaatgcccggcctcatggcgtgccgcgccctgttcgtcccgttcaagtcc

SEQ ID NO: 29574 - DNA, 428 bp, Zea mays
  Clone ID: LIB3180-048-P2-B1
agtggacgtactactggtattgttctcgactctggtgatggtgtgagtcacactgtgcccatttatgaaggatatgcccttccccatgccattcttcgtctggatcttgctggtcgggacctcacagactccctcatgaaaattctcactgagaggggttattccttcacaacctctgccgagcgagaaattgtgagggacatcaaggagaagcttgcatatatagctcttgactatgagcaagagttggagactgccaagaacagctcctcagttgaaaagagctatgagctgcctgatggccaagtaatcaccatcggcgcagagagattcaggtgccccgaggttcttttccagccatccatgattggtatggaggctgctggaatccatgagacaacatacaattcaatcatgaagtgtgatgt

SEQ ID NO: 29575 - DNA, 186 bp, Zea mays
  Clone ID: LIB3180-048-P2-B10
tcgggaaacctagacaagcgaggcggcggccccgcgttctccgtctggggctgcgtctccgaccgaccggcgtaaagaaaaccctccctcaccacagccgccacgccatggccgaggagaccgacaccaggcctgcctccgcgggctcccgaggccgccccgcgcccgaggacgacgacagggagg

SEQ ID NO: 29576 - DNA, 309 bp, Zea mays
  Clone ID: LIB3180-048-P2-B11
tcgattttgatcggcgaacagatagagatttgggatatacatggacatgctattcaaattctagaaacggataatggattatgccacatgggaaaagtatctcaggggatcaatgtaacagaactttaccaacattagatggatatggatgcactttggcttaggctgctctataaaaaatgatgaacttggatcgtccaccggattggctcagtcaagggacctggtgatacatgcacagaggtgcatgtacactcctgtgtaccagaaactaccggtagagctgctgggatcaattttgcaccaata

SEQ ID NO: 29577 - DNA, 335 bp, Zea mays
  Clone ID: LIB3180-048-P2-B12
tcgcgaagctcaatcaattcactcaaacctcttccccaaatcttcgattagattctcgttgacaagaagactagaaccgaacctgaccatgtcgctgatccgccgcagcaacgtgttcgatcccttctccctcgacctctgggacccctttgagggcttccccttcggctccggcagcagcagcagtctcttcccctcgttcccgcggaccagctcggagaccgcggccttcgctggcgcgcggatcgactggaaggagactccagaggcgcacgtgttcaaggcagacgtaccggggctgaagaaggaggaggtcaaggtggaggttgaggacg

SEQ ID NO: 29578 - DNA, 235 bp, Zea mays
  Clone ID: LIB3180-048-P2-B2
gggcaacctatgtctgaaccttgggtgcctcatcaccagtaaacttcttcagacggttgccagcaaggactgactctatgctataaataagccactacctggtggtcttatcgttgtaatccctagagatgctttctctgttactgtagtttgctcgccttcgttgctatttgtaactgtgtctgttcagaacttgagagcctgttaattgtatcagttgttgaattctgggaat

SEQ ID NO: 29579 - DNA, 256 bp, Zea mays
  Clone ID: LIB3180-048-P2-B4
gccgcttcccttgcgttcgcggagagtctgtctgtctgtctagctagctagctagctgcacgagagcgtgaggaggaagggggatccatggcgggggaaaaccaggaaaaggatacggcctgcgcgcaatacaggcacgggccgccatgggtgttcaaaggcagaccatattaccatttttatttgatgaaggctacatcgcttcaaaattaaatatgacttactatcatatgatttaattattaactaaattata

SEQ ID NO: 29580 - DNA, 275 bp, Zea mays
  Clone ID: LIB3180-048-P2-B6
tcgatctgctccaccaccggcacatcgccgccgaccttattcctccgccgctcgaggagtcagccgagccaacggagggagaccatatgggcgcggaggcagcgcatccgcagcaacagcctccctcctccgtccgaccctgcagggaggcggcggcgcccgcggtgctggggctgcagctctcggcgctgatcgaccacgtcgcgcgcgtcgacaggtcctttctcgaccgagacgttggctaccgtgatggctttgcatcaggtgatcattgt

SEQ ID NO: 29581 - DNA, 388 bp, Zea mays
  Clone ID: LIB3180-048-P2-B7
ttgccctcccgacctcctccgcctcacggtgcacgcctcgtgtccccccaccggctcctcctcctcctcggccggccgcctcacgccgtcacctccgctcggcgagtctcggctccgacagcagccgccacgtgcgacctcccctactcctgagagatctgcggggctcggcatggggtgaccagatcgggccgctgctcggtgctctccagctgaattctgcccgcagctcgtgtcggaggcagcggagatggcggaggccggcgtggcacgcggctcagggagtgctggcgatgctttgttcagggaactctgtcatgcttgtgctgggccattggttacagtgcctcgcctaggctagctggttattacttcctgatggtcatat

SEQ ID NO: 29582 - DNA, 197 bp, Zea mays
  Clone ID: LIB3180-048-P2-B8
tcgcgcttcgaaacccccgacgcgaaggaagctagggaaccctcgcgagtcgcgttgcctcgcccccgtccccttcagctggcccgccgccgcctcgaatccgccctggctcggagggcctcgcgcccccacggatcggattctcgaggttggtggatttggggctagggtttggggattgactactatcgtggggt

SEQ ID NO: 29583 - DNA, 274 bp, Zea mays
  Clone ID: LIB3180-048-P2-B9
tcggtcccctgctccattctcagccgccggcaatcccttcccgtgctccggagccgctgagtgagaagaagagatggccggcaagggcgatggcccggctatcggcatcgatctcggcacgacgtactcttgcgtcggcgtgtggcagcacgaccgcgtcgagatcattgccaacgaccagggtaaccgcaccacgccctcgtacgtcgtcttaaccgactccgagcgcctaatcggagatgcggccaagtaccaggtctccatgaaccccatt

SEQ ID NO: 29584 - DNA, 150 bp, Zea mays
  Clone ID: LIB3180-048-P2-C1
ttgcatcactgggtcttcagaccattagctttatgtactccagagcgcagaagaacgcgatcgacaccatgagggtgttgctcgttgccctcgctctcctggctctcgctgcgagcgccacctccacgcatacaagcggcgtgtgttgtt

SEQ ID NO: 29585 - DNA, 326 bp, Zea mays
  Clone ID: LIB3180-048-P2-C10
tcgcacagccgcggatagagaaggaaaaatttccccaaaccctagctggggagctcgatggcgaacccccgcgtcttcttcgacatgaccgtcggcggtgccccagccggccggatcgtgatggagctgtacgccaacgaggtgcccaagaccgcggagaacttccgcgcgctgagcacgggcgagaagggcgtgtgcaagtccgtgaatgccgttccactacaagggctctaccttccaccgcgtcatcccccagttcatgtgccagggcggtgactggaccctctatttcggcaccggcggctagttcatctacggcgagatgt

SEQ ID NO: 29586 - DNA, 283 bp, Zea mays
  Clone ID: LIB3180-048-P2-C11
tcggtttgctatgaggaaaaacaaatttatgggctcaaacaaagtgtggtagtgaaagtcattttgcttccagcttaagaaccaagccaagaaaacagttatcaactgtgacgccacactcaaaagcttgtttggtgagagggataaggttgggatgctggagatctctaagcttttgagccgtggcttcccgaaaatctccaagcttttgtggtccatggagccagggatggctctttggtaaaagactctgttgtggttgtctttttttatggtccatgtt

SEQ ID NO: 29587 - DNA, 346 bp, Zea mays
  Clone ID: LIB3180-048-P2-C12
tcgggtatatatatacggcgccggcgccgaggagagaggaccccggccgatcccgcacccctgactgtcagccgcgatccgctcttttttgcgtgcagcggcggagcaggagagatggcgtcggaggccaaggacgtgggcatcctcgccatggacatctacttcccgcccaactgcgtgctccaggaagagttggaaacacatgatggcgtgagcaaagggaagtataccattgggcttgggcaggaaagtatggcattttgcactgaagttgaggatgttatttcgatgagcttgacagtggtgaagtcccttctgaaaaactattaacattgtcccaaagtgc

SEQ ID NO: 29588 - DNA, 287 bp, Zea mays
  Clone ID: LIB3180-048-P2-C2
tgatgaatcaagattccgcacggttgcgtacctctcgcaaatctggtggtttgaagtgagaggggaggttgaattcttcttcccagaaggcacgtacagcctattctaccgcattcatttcggccgaccattcaagcgttttggccggcgagtctacagctcggagcacgtccacggctgggacatgaagccggtgcgtttccagatgtctaccttcgacgtacagtatgttcagtccaagtgctacttgatcgatccctgtatctgtatcaaccaccatgtctggt

SEQ ID NO: 29589 - DNA, 236 bp, Zea mays
  Clone ID: LIB3180-048-P2-C3
tcggctccccgatcctgggccagtgcgtcgagttgctgaggcatcagtgcaggccggcggctacaccctactgctcgcctcagtgccagtcgttgcggcagcagtgttgccagcagctcaggcaggtggagccgtagcaccggtaccagtcgatctttggtttggtcctccagtccatcctgtagtagcagccgcaatgcgcccagttctcggtatcttttttcttctcttcactt

SEQ ID NO: 29590 - DNA, 212 bp, Zea mays
  Clone ID: LIB3180-048-P2-C4
tcggattaacagtggccacgacggcggcggcggcggcggcgacgccactgagggaggccctgaaggccctcgtggcgcacatccaggggctctccggcagtcccgaggagctggcgcaccttcacagccttctcaagcaggcggacggcgaacccttgtgcgcccactccttcttgctgtttcttttttttgcgcaccttattctatagacc

SEQ ID NO: 29591 - DNA, 290 bp, Zea mays
  Clone ID: LIB3180-048-P2-C5
tcgcccaggcggccaggccctggcccgcgggcgcaccgcaccgtagtttggggcttgcgcaaggaagcgagagaaaatcgagtgaaaaggaaggggaaataaggctgaatcacagtttctggatcggaggagcatccccgcctaggtctctgcagccatggttcgcggatcgctcggcaagcttgcatcgcgcgccctctccgtcgccgggagatggcagcaccagcagcttcgtcgtctcaacattcacgagtaccaggtcgcggagttgatgggtaatatacgggatc

SEQ ID NO: 29592 - DNA, 336 bp, Zea mays
  Clone ID: LIB3180-048-P2-C6
tcgttttcggcggcgacgagcacccaccagcagttctgtagaaatggctgatggtgaggacatccagcctcttgtctgcgacaatggcaccggaatggtcaaggctggttttgctggggacgatgcaccaagggcggttttccctagcattgttggccgtcctcgccacactggtgtcatggtagggatgggacagaaggatgcatatgttggcgatgaggcacagtccaagagaggtatttttacgctcaagtaccctattgagcactgttttgtgagcatctgtgatgacattggtgaatatttggcattatactttctactacgagctttttg

SEQ ID NO: 29593 - DNA, 422 bp, Zea mays
  Clone ID: LIB3180-048-P2-C7
tcgaagcaagcccctttatgtagctcttgcgcagcgtaaagaagacagaaaggcaaagctacaggcacaattttcacaaatgcgtcctgttgcaatggcgccttcagtaggtcctcgcatgcccatgtttccacctggtgtccctggagttggtcagcagctgttctatggtcagccaccaccagccttcatcaaccctcaggctggatttgctttccagcaacctctgatgcctggtatgaggcctggtggtccaatgccgaactttatgatgcctatggttcagcaaggacagcaaccacagcgtcctgctggtagacgtgctggtggaatgcagcagcccatgccaatgggtggtcagcaacaggtgttccctagaggtggtcgtggctatcgttatcctactggacgtggattgcctt

SEQ ID NO: 29594 - DNA, 258 bp, Zea mays
  Clone ID: LIB3180-048-P2-C8
atctgccgcaaccgcggtgtcggtcgacgagaagctcgacaagcttcgcgccgaggtcgccaaactcagccagatcagcgagaacgagaaggccgggttcatcagcctcgtgtcacgctacctcagtggggaggcggagcagatcgagtggagcaagatccagaccccgaccgatgaggtagtggtgccgtacgataccctcacgtcgccttctgaatatctcgaggagacgaagaagctgctggacaagctcgttgt

SEQ ID NO: 29595 - DNA, 378 bp, Zea mays
  Clone ID: LIB3180-048-P2-C9
tcgatttccacgaaaatctcgctgctctcgcgaaaaaggacgccacccgcccgtgcttgctctccagtttgcaccctggaggcaggtgcaggtgcaggggcgctcctcaccagcgggcagtcaaccgcccgcgtcggccatggcggaggcggggaggcggacgcttgcgctggtgaacctggcggccatcatggagcgcgccaactaggtgctgtttcctgatgagttcagagaggtgtttatcttttgtatttctttactattcttatttttattgttttgggtttttttcattattatctacatttattttagtctttgttttgtcttttcttatacagtatgatttttgtcatcattttttattatttataaata

SEQ ID NO: 29596 - DNA, 424 bp, Zea mays
  Clone ID: LIB3180-048-P2-D1
tcgcttgcactgtgctccttcgtctcctcctcccctgcctgccaccaactgccaaggtgccaagcaagtgcagataccttccctgcctcacaaacaacgccatcagggtcttcaaccagggcaggttctcttctttcattcagctatgggcaacctgtgctgctgtgttcaagttgaccagtcgactgtggccatcagggagcagtttggcaagtttgacagcgtgcttgagccaggatgccactgcatgccttggttcgccggcaagcgtgtagctgggcatctcacactcaggctgcagcaactggatgtgcgctgtgagacaaaaacaaaggacaatgtttttgtgaatgtggtggcatctatttagtaccgcgctctggctgacaaagcatgtgacgctttcttacaaactgagcaacac

SEQ ID NO: 29597 - DNA, 391 bp, Zea mays
  Clone ID: LIB3180-048-P2-D10
tcgaacttgcactacagatgagagttcatccggcatggattgtgcttggaatgaacatggttcatgtaatgcttcagtcatggaatgcagtgatgattccggttcagagaatgaaattttccgagtcaagcgcaggtccaccttatttgacaaacctacttctgaaacaaagacatcaaccttgtctgaacagcaggttctgaggcggctgaagaaggtacgtcctggagtacagcaggtcagtaagcgtccagaagaatctggtaatggttcagttcgctctacccatatgagcccgagctcaaatcatgcctcttcggatgatgaaatagacatggctcccctattcttgaggataaagcgtcggctgttggaataccaagatgttaca

SEQ ID NO: 29598 - DNA, 432 bp, Zea mays
  Clone ID: LIB3180-048-P2-D11
tcgtagaaagtggaatccagtagcaacaatagagcaacaatggcgaccaggagattttccctccttatgctccttgctctttctgcatgtgttgctaacgcgacaattttccctcaatgctcacaagctcctatagcttcccttcttcccccataccttccatcaatgatagcttcagtatgtgaaaacccagctcttcaaccctataggctccaacaagcaatcgcagcaagcaacatacctttatcacccttgtttcaacaatcgccagccctatctttggtgcagtcattggtacaaaccatcagggcacagcagctgcagcaactcgtgctacctgtgatcaaccaagtagctctggcaaacctttctccctactctcagcaacaacaatttcttccattcaaccaactgtctacattgaaccgtgct

SEQ ID NO: 29599 - DNA, 206 bp, Zea mays
  Clone ID: LIB3180-048-P2-D12
tcggcgaaacccactccgctctcccgagatcggacacatggcggcggcagcggggacgtccaacggcggcgcagtggccgcgaacgggccggcgcccggcaggctggcctccgtgtacagcgaggtgcacacgagccggctcctgcacacgctgccctgtccctacgtcctgcgatccaacttctagggcgtcgacggacccgcca

SEQ ID NO: 29600 - DNA, 333 bp, Zea mays
  Clone ID: LIB3180-048-P2-D2
tcggatgaccctgccaaggaggctgctagcttcacctcccaagtcatcatcatgaaccaccctgggcagatcggcaatggctatgccccagtgctggactgccacacctcccacattgctgtcaagtttgctgagctcataaccaagatcgataggcggtctggcaaggagcttgagaaggagcccaagttcctgaagaatggtgatgccggtatggtgaagatgattcccactaagcccatggtggttgagaccttctctcagtatcctcctctgggtcgttttgctgtccgtgacatgaggcagactgttgctgttgtagtcatcaagagc

SEQ ID NO: 29601 - DNA, 433 bp, Zea mays
  Clone ID: LIB3180-048-P2-D3
tcgtttctagcaacatagaaagcacaatagtgtaccaacaatggcagccaaagtattttgcttccttatgctccttggtctttctgcaagtgttgctaccgcaaccattttcccacaatgctcacaagctcctatagcttcccttcttcccccatacctctcaccagcggtgtcttcaatgtgtgaaaacccaattgttcaaccctacaggatccaacaggcaatcgcaacaggcatcttaccattatcacccttgttcctccaacaaccgtcagccctattacagcagttacctttggtccatttggtggcacaaaacatcaggtcacaacatctacaacaacttgtgctagcaaaccttgctgcatactttcagcaacatcagtttcttccattcaaccaactggctgcattgaactttgctgtttatttg

SEQ ID NO: 29602 - DNA, 286 bp, Zea mays
  unsure at all n locations
  Clone ID: LIB3180-048-P2-D4
tgttttcgcgtggggttccagatattatcagtcgaccagtttattcggcgcaggaggaaatttctagctaactaccaagctaccttntctcgctgctaacgccagcatctcaggtaacaatttaccatccatgcagtggtcattatggtctaaatattacaatctcaccgtgcaactctttatttcccaaccaagcattaagctcattattttgtttatttcaatgtcaagtgagttgtatgttataatttcttttattattattacatttaaatattgaattttt

SEQ ID NO: 29603 - DNA, 475 bp, Zea mays
  Clone ID: LIB3180-048-P2-D6
tcggtcaatcccgagcagtggtgcgaaacctcgagcgctcgcgccggtgacgatagcgaaagaggaagccgcggtagcactggtagcggcagcagtaagggggagatgtcgtcttcgttcagcggtgatgagaccgcccttttcttcggcttctttggcgccattgttgcgctcgttttttcatgcatgggggcgttgtactttactatttattttgttttttttgtttatttttatttttttattttctttatatttctttttatattctatattttgtgtttttgttttttgttaatatattatatctatatattttatatttaattttgattttttttgttttttatatttttctatatttcattagatttttgtatttctttcattcatttatatttgtttttttattagtatataatatgtttatattgtattgtttatatatattatattatatcttatattatcttat

SEQ ID NO: 29604 - DNA, 271 bp, Zea mays
  Clone ID: LIB3180-048-P2-D8
atcgtccgacccgaaagacgaggtataggaggtggcgagctacagaggctgcggatggacacggctacactgagagaagggctgccgctcctcaaggctgagcatgcattctacttggactgggctgttcactccttcagaattaccaactgtgagattcatgacaccacccagatccacacccacatgttctactccatcttaaacgacatcattcactctatcatcgacatggacactaacgtgatcaccatttataactctcgtttct

SEQ ID NO: 29605 - DNA, 297 bp, Zea mays
  Clone ID: LIB3180-048-P2-D9
tcgcaactcgccgtctgccttctgcgcctccatttcggcctctgtccctggcaggttcaatctcacctccaaccatgggtaaagagaagtcccacatcaacattgtggttattggccacgttgactctggcaagtcgaccaccacaggacacctgatctacaagcttggaggcattgacaagcgtgtgatcgagaggtttgagaaggaggctgctgaaatgaacaagcggtccttcaagtacgcatgggtgctcgacaagctcaaggctgagcgtgagagaggtttcatcattgata

SEQ ID NO: 29606 - DNA, 413 bp, Zea mays
  Clone ID: LIB3180-048-P2-E1
ggtggacggacggtgctggcatcgccaattcaactccgcatctgcatcggcagcgcgccagctccatagtgtaggaggagatggcgctcacaagaatcggtcttgctggccttgcggtcatggggcagaaccttgccctcaacattgcagagaaagggttccccatctctgtgtacaacaggacaacctccaaggtggacgagaccgtgcagcgtgccaaggcagaaggaaaccttcccgtctacggcttccatgaccccgcgtcctttgtgaagtccattcagaagccacgggtggtgatcatgctcgtcaaggccggcgcgccagttgaccagaccatcgcgacgcttgcagttcacttggagcagggcgactgcattatcgatagggggaacgagtggtacgagatcacg

SEQ ID NO: 29607 - DNA, 422 bp, Zea mays
  Clone ID: LIB3180-048-P2-E10
tctccgatcgatcgccacagccaacaccacccgccgaggcgacgcgacaggcgccaggaggaaggaataaactcactgccagccagtgaagggggagaagtgtactgctccgtcgaccagtgcgcgcaccgtcctttatggctgttcatcttttttactatcctgtggattaattgttatggttgcttttttacattctatttatttgtttcatctttttttttttttttttttattttattatttttattttattattattatttttttattatgttttttttatttttatttttttattatttattttttttttttattatttattctatttgttctattttttatatttttttttatatttattaattattttttattttttttattttattttttatttgtttatttatttatttttt

SEQ ID NO: 29608 - DNA, 436 bp, Zea mays
  Clone ID: LIB3180-048-P2-E11
tcgagggtttccttcctatccacccacagccaccacccacccccaacagcaggcgctagaaccgccggacaccgccgtcgttgccccccgggaggctcaaccttccctcccgggggcagccacaccccagtcgccgctccctagcagccgccgcatcctcccctctctctccagtcgccgcatggccactgcctcctcgtcgctccgcttcctcggcctgctcaagcaacccgacgacgccagctcccagtcccacggcatctaggcgctggagctcgacgagcgcgacgtcgtctggtcctccagcgcgacctcctcgtccttcgcggcctcctcgccgttcccgaccgccagcctcgggaggccgatttccgcgtcgtcccgccacttccccgccggcagcatggggctggacgcgctcctcgccgacgaccac

SEQ ID NO: 29609 - DNA, 258 bp, Zea mays
  Clone ID: LIB3180-048-P2-E12
gctacggtggtggtgcatctgccacctgcggttcacctgccacctgcggggcatctcccaccgccggtccacctgccgccgccggtccacctgccaccgccggtccatgtgccgccgccggttcatctgccgtcgccaccatgccactaccctactcaaccgccccggcctcagcctaatccctagccacacccatgcccgtgccaacagccgcattcaagcccgtgccagctgctgggaacctgcggcgttggctag

SEQ ID NO: 29610 - DNA, 393 bp, Zea mays
  unsure at all n locations
  Clone ID: LIB3180-048-P2-E4
tcgcatggatggccagacccgtgaacatgctctccttgcgttcacccttggagtgaagcagatgatttgctgctgcaacaagatggatgcaaccactccgaaatactccaaggcacgttatgatgagattgtgaaggaagtctcatcctacctcaagaaagttgggtacaaccctgataagattgccttcgttcccatttctggttttgagggcgacaacatgattgagaggtccaccaaccttgactggtacaaaggcccaaccctgcttgaggctcttgaccagatcaccgagcccaagaggccttcggacaagcccttgcgtctgcccctccaggatgtgtacaagattggnggtattggaactgtactcgttgtcttgtggagactgat

SEQ ID NO: 29611 - DNA, 434 bp, Zea mays
  Clone ID: LIB3180-048-P2-E5
tcgctactccccccacccccggtctgaaacccaagcttccgcttctctcatgggcgacgccaccgccgccctctcagctcggagcaaggtgcaggctttcctggaggctgcgcgcgccggcgacctccaatccctcaagaacctcgtcgcggcgctcgacgaggacggcacgggcgccgcctccgtcgccgccgccgtgcgcgacgccaacaagcgcaccgccctccacttcgcggcgatcggatgtcgcaccgacgtctgtgaattcctcatcggcgagctcggcctctctgtcgacccaaaggacgatgatggcgaaactccgctcattcatgcgacacgcctgggccatctggacactgtcaagtatcttttctaccatggtgctgatcctcggtggccacctatctaggtgccacagtgttacaccatgc

SEQ ID NO: 29612 - DNA, 293 bp, Zea mays
  Clone ID: LIB3180-048-P2-E6
tctcctagatccaggacaaggagggcatcccaccggaccagcagcgtttgatgttcggtggcaagcagctggaggatggccgcacccttgcggattacaacatccagaaggagagcaccctccacctggtgctccgtctcaggggtggcatgcagatctttgtgaagacactcactggcaagacaatcacccttgaggtggagtcttctgataccattgacaatgttaaggtcaagttccaggacaaggtgggcattccaccggaccagcatcgccttattttttccggctat

SEQ ID NO: 29613 - DNA, 383 bp, Zea mays
  Clone ID: LIB3180-048-P2-E7
ctcattatattgctctatgtagtcatagtgtcgtagttctgctcttctggttggtaatgtagtatattatttagctagcagtcagctggtgcttaatgatttattggattttggcggcaggtacattcaaagcacttgtgctacaacgggtgagggattgtatgaaggcctggactggctgtccagcaacattgcaaccaagtcctaaattgtcaagcaaggtttggatcatctaggagcttttggatgatgatgatggtgctggatatttagggttgggttggttatttttgtttttacatactatattactttatttgtttattttatttattgattttatttattattgtttgttctactgtatttatatttttttattt

SEQ ID NO: 29614 - DNA, 247 bp, Zea mays
  Clone ID: LIB3180-048-P2-E8
tctagcaaatcaatattgtaaaagttgcttgacatcttgcaagacatggagaagttgaaggcatcagtgatgatagcaagtgctatcagtgacttaataaagcacttgcgcaaatgtatgcattttgctattgaagcatctaatgcaaatgctgattgtgacaagtggtacagtgcactttatgtggccttggaggagtgcctagtgcatttgacagaaaaggttggggatgttgtatcttttcttg

SEQ ID NO: 29615 - DNA, 405 bp, Zea mays
  Clone ID: LIB3180-048-P2-E9
atcgcatattccccttcccatcccatcccttccgcatcgtccccgaacgacgcagacggacgcaaggcacggcgccgacatctccccgtggcccgagggcccagacatgaaggccctgggcgcgcacgccgccgacctgctccgaggcccgcacctactccgcgccgccgtcttcgctttcgccgttgcgctcgccttcctcgttggctaccactggcccaacgcctccccgcgccttgtcttcttctcgtccgatgcctcctcgttgtcgcccaggtcgtccttccgctctccttccgttgtgctctcccctaactctaacgtcttcttcgacccatccctgatccctatccccagcaccctggctgcttcttctactctcaatgccttggtcccgcctttact

SEQ ID NO: 29616 - DNA, 231 bp, Zea mays
  Clone ID: LIB3180-048-P2-F1
atttgtttgccttctgccttctgcgcctccatttcgggctctgttccttgcaagtgcaggtctctcctccaaccatggttaaagagaagtcccacatcaacattgcggttattggccatgttgactctgtcatgtctaccaccacaggacactttatctacatgcttgtaggcattgacaagcttgtgatcgagagtgttagagaaggaggctgttgaaatgaacaagctg

SEQ ID NO: 29617 - DNA, 186 bp, Zea mays
  unsure at all n locations
  Clone ID: LIB3180-048-P2-F11
gaaatcccagtcaagggacaaggatggtgaggtgggagatgatgtgttggattaanaactgtaggctgaggaaactgacaacccagagctagctgttaagcctgtttatgtcaaggacgtcttctttaattccctctctagtctaatcttcttacttttagtgtctaattacatgccccgaccttt

SEQ ID NO: 29618 - DNA, 311 bp, Zea mays
  Clone ID: LIB3180-048-P2-F12
tcgggcagcaacaccaccaagaagagcaagctgtcgtggtccaagagcttggtgaggaagtggttcaacatcaggagcaaggcccacgacttccacgccgacgatgtggccgcgattggtaggacagttgcaggagggggcgatgactagtggaggaggggcagcagcttcacccgtagggagccgagcacagtgaagaagagcaagacagagaggtcctcgaggaggagcaatggtcactcgaggcggttaaagattgtccttgatgccttcgaagccacattgacattggactttaggatatttgttgc

SEQ ID NO: 29619 - DNA, 255 bp, Zea mays
  Clone ID: LIB3180-048-P2-F2
tcggttgcaacaccgactgcttaatctcttcctttgcctcttcctatctccagcgcatcccaagaggcggaaagggaggagcgtggagcggcgaattattgtttgtttccccaagatgtcttctccaagcaagcgccgggagatggacctcatgaagctgatgatgagcgactacaaggtggagatggtgaacgatgggatgcaggagttctttgtagaatttcgtgggcctaacgaaagcatctatcaaggtgg

SEQ ID NO: 29620 - DNA, 179 bp, Zea mays
  Clone ID: LIB3180-048-P2-F3
ttctttttttatggccagacccgtgaacatgctctcggggcgttcaccctgggagggagtcatattattctctcctgcaacaagatggatgcatccactccgaaatactccatggcacgttatgatgtgattgagaaggaagtctcatcctacctcatgaaagttggctactaccctta

SEQ ID NO: 29621 - DNA, 434 bp, Zea mays
  Clone ID: LIB3180-048-P2-F4
tcggattgcacaagtacaccttggctacgaccctgggccgccgcctcagcctgaacgtcaactcatctcgccggtggtcgatctcctccatctgctcgccgcggcgcaacccggagaggagaccgcgctcggtcgagcaccacctggggctagcgtcctcgcgacgagctccggcgcggcgtccgccctctgcagccccggtgtccccgcgaccggcttccgcgcggccggcacacagctccacaggccaacgggacctgattcatggcgaagcaggcgtacgccacgagcagtctcgtggtcgggtacgcgctgtgctccagcttgctggctatcatcaacaagtatgccatcaccaagttcagctaccccggactgttgaccgccctgcagtacctgaccttggtggttggagtgtgggtgctcgggaagct

SEQ ID NO: 29622 - DNA, 412 bp, Zea mays
  Clone ID: LIB3180-048-P2-F5
tcgctgcactgcgctgcgcccatccatccttaaaccctcctgcgcgcgtagggctcgtcttgtccttccccagcacaacctctcctcctccttcgccaggtgcctcttcgttctcctctccgggctatcaggacgaaataactggccgcgctgcacgccggccgcctcgagaagaagcgctcgccccgcgcgcgcggctccgggctaccaggacgaaataactggccgcgctgcacgccggccgccgcgagaagaagcgctcgccccgcgcgctctgccgctggttcggccgtgccatcccgacgaggttcccccagctgtgcccgctcgatcttcttccgcgcgcacgcgcacgcagtggtccgtcgccgctgattgatcctgcaggaaaaacaggtcaaggagcttcttt

SEQ ID NO: 29623 - DNA, 311 bp, Zea mays
  Clone ID: LIB3180-048-P2-F9
tcggaagagatctcctctatggttcttatcaagatgcgtgagattgctgaaggttaccttggtagcacgatcaagaatgctgtggtcacagtccctgcctacttcaatgactcacagaggcaggccacaaaggatgctggggtgattgctggccttaatgtgctgcgtatcatcaacgagccaacagctgcagctatcgcctatggtcttgacaagaaggctaccagtgtcggtgagaagaatgtcctcatctttgatcttggaggtggtaccttatgtggcttccttctaatccttgatgaaggtaactt

SEQ ID NO: 29624 - DNA, 354 bp, Zea mays
  Clone ID: LIB3180-048-P2-G1
tcgccattggactgcttgctccctgttgaccattgggtattctgaaccatcgagccatggctgccaagctgactcgcctccacagtcttcgcgaacgccttggtgccaccttctcctcccatcccaatgaactgatagcactcttttccaggtatgttcaccagggcaagggaatgcttcagcgccatcagctgcttgcggagtttgatgccctgtttgatagtgacaaggagaagtatgcaccctttgaagacattcttcgtgctgctcaggaagcaattgtgctccccccatgggttgcacttgctatcaggccaaggcctggtgtctgggattacattcgggtgaatgtaa

SEQ ID NO: 29625 - DNA, 421 bp, Zea mays
  Clone ID: LIB3180-048-P2-G10
tcgcttaaccattcctcccaacaccacctcgcctgcgatctccgtagcctccgtcgcgtcgagcatcgatcatgtcggcctactgcggaaagtacaaggatgagctcatcaagaatgctgcctacattggcacccctggcaagggtatccttgctgctgatgagtccactggcaccattggcaagcgcctttccagcatcaatgtcgagaacgttgaggagaaccgccgtgccctccgtgagctcctattctgctgccctggtgctctccagtacatcagcggtgtgatcctcttcgaggagaccctgtaccagaagaccaaggatggcaagccttttgttgatgtcctcaaggagggaggcgtccttcctggcatcaaggttgacaagggcaccattgtaggttgtggcacttgttaagg

SEQ ID NO: 29626 - DNA, 305 bp, Zea mays
  Clone ID: LIB3180-048-P2-G11
tcgcgaagaaaaagcacaagaagcatcaccaccataagtcaaagagtaagaggcatcactcagatgagaattcagattcagatgaaataagtgatggcaaagaagagagaaggaagaggtctcattcttctcttcataagaaagaagagaacatgtccaggcataagaagcagcacagagaagattcatcagattcagacgatgaaccacagagaagaaagcaggatgtatcagaaaatgatgaaccgaggagaagactacatgacgacgatgaaccgaggagaagatggctgggtgacgtttaa

SEQ ID NO: 29627 - DNA, 371 bp, Zea mays
  Clone ID: LIB3180-048-P2-G12
tcgggaaaaagccccgaaagtagaacctcccaagatgcaagcaccgaagccaactgcaccattaaaaacgtccccttcagaaccacaactccctccaaaagaacgggagcggcgggtgccgatgccaaggctcaggaagcgtattgcaaaccgtcttaaggattctcagaacacctttgcaatgctatctacatttaatgaagttgacatgaccaatttgatgaagcttcgttctgattataaagatgaatttgtcacaaagcatggtgtcaaattgggtcttatgtcttgctttgtcaaggctgctgtttctgcacttcaaaaccagccaattgttaatgctgtcattgatggcgtttacatcatattca

SEQ ID NO: 29628 - DNA, 378 bp, Zea mays
  Clone ID: LIB3180-048-P2-G2
ttcgacattgccatgacagccaatatgtactgcattgtgtgcgctcctagctctgtgggcaaccgccactggggctacccatatcccagggcacttgtcaccactactgatgccattggctaccatgaacccatggatgcagtactgcatgaagcaacagggggttgccaacttgctagcgtggccgaccctgatgctgcagcaactgttggccttaccgcttcagccgtgccagatgccaatgatgatgccaggtatgatgccaccgatgacaatgatgccgatgccgaatatgatgccatcgatgatggtgccgactatgattgtaccaataacgatagctagcttgatgccacctatgatgatgccaaacatggt

SEQ ID NO: 29629 - DNA, 292 bp, Zea mays
  Clone ID: LIB3180-048-P2-G3
tcgctgtgaaagggagccatagagtatgaagagtttctgaaaactggtgacccggagttcagttggaagccaccgaaggatgaatggcagagcatcgccctaggctacacttctgggactacttccagcccaaagggcgtcgtgttgcatcaccgcggtgcttatctcatggcactcatcgttgccatcgtgtgggggatgcctgatggagctgttttcttatggactttttccatttttatattgaatatgattttgttacactttatccttttgctatttatttgcttta

SEQ ID NO: 29630 - DNA, 480 bp, Zea mays
  Clone ID: LIB3180-048-P2-G4
tcggtttatcataccagaacctgaacaaagggtgtcatgtgctgatagattgggagctttcctacggagatccaaggtacgcgagagagagagagtatgatatttgctggggcacagggaaaaggactggcccgctatattaaatgggaataaggtgtgtctgcaagctagctagcatcatctgatagttgtatgctagcacttaatttttataattttttagaataattttagtactcttttttaatatatttatatactaattgttttgttaacttttcttattaatttgagttataattatttttttttatatgtaattttatttattttgtaattaagaatatatgtttatttatattatatattataaattaattatatatatttaattgatattacattaaattatttatttatatataaatatttatttattatattatttttattttatattattgtaatatatattttaat

SEQ ID NO: 29631 - DNA, 390 bp, Zea mays
  Clone ID: LIB3180-048-P2-G5
ttggactgcttgctccctgttgaccattgggtattctgaaccatcgagccatggctgccaagctgactcgcctccacagtcttcgcgaacgccttggtgccaccttctcctcccatcccaatgaactgatagcactcttttccaggtatgttcaccagggcaagggaatgcttcagcgccatcagctgcttgcggagtttgatgccctgtttgatagtgacaaggagaagtatgcaccctttgaagacattcttcgtgctgctcaggaagcaattgtgctccccccatgggttgcacttgctatcaggccaaggcctggtgtctgggattacattcgggtgaatgtaagtgagctggctgttgaggagcttattgttattgtagtacttg

SEQ ID NO: 29632 - DNA, 302 bp, Zea mays
  Clone ID: LIB3180-048-P2-G6
aggggctttacatctgatgttatgttgccaaatgatcaaggattgctatgtgttactgctgatcagcagtttttgttctattgtcccaaaagaactgatgatggggactttgaactgtctctatatagacgattaataggttataatgatgagattcttgacttgaagtttatcggggaggaggaacaataccttgctgtagctaccaacttggagcaggtccgtgtttacgatgttgtgtcgatgtcatgttcttatgtactttctttgctacacttgtatatgttttttgtatttactct

SEQ ID NO: 29633 - DNA, 232 bp, Zea mays
  Clone ID: LIB3180-048-P2-G7
tcggcggagaccagccctgaggacgtcggcggcatgcacgcggctgccggagtcctcacagaaagaggtggcatgacctcccatgccgccgtggtggcacgcggttggggaaaatgctgtgtctcgggatgctctgggattcgtgtaaatgacgcagagaaggatgtggatatcgtaggcaactctcttcgccgaaggaactgtctttctatctatgtatcgacctccagtt

SEQ ID NO: 29634 - DNA, 247 bp, Zea mays
  Clone ID: LIB3180-048-P2-G8
tcgattggaagggcagctaataaggtaaggggcgacgaaaatggctccaacggccgccaccaaggacgacagtggctacggcgacgagcgccggcgcgagctgcaggcgttcgacgacacgaagctgggggtgaaaggcctggtggactccggcgtcaagtccatcccgtccatcttccaccacccgccggaagccctgagcgacataatttctccggcgccgtctctgccgccgatgatgttcttc

SEQ ID NO: 29635 - DNA, 395 bp, Zea mays
  Clone ID: LIB3180-048-P2-G9
tcgcgccgtccttcacctccgccgccgaatccgagactctgatctcgggttcaccgcagcgcacagagcacccctgactcccggcccgatccgcgctctcctctccgacgcttcagtcatggcaggaatggcacccgagggttctcagtttgatgctaagcactatgattctaaaatgcaggagctgctgagcactggtgagactgaggagttcttcacttcatatgatgaagtttttgaaagttttgatgacatgggcctacaagagaatcttctgagaggcatttatgcatatggttttgagaaaccatttgcaattcagtagagaggaaattgttcccttctgtaaggggctagatgtcatttagcacgcacaatctgtttcatgtatagac

SEQ ID NO: 29636 - DNA, 245 bp, Zea mays
  Clone ID: LIB3180-048-P2-H1
tcgggtgaatctcatagagtggcttaagatgatggttaccagtaagagggcagaggaggtagtggatccaaacctcgatgttaagccaccaaaacgtgcccttaagcgggcaatcctggttggcttcaagtgcgttgatcctgatgctgacaagaggccaaagatgagtcacgttgtccagatgcttgaatcctttcagaacgcataccatcaagatcaaagtaagctcagtcaggtggtaagta

SEQ ID NO: 29637 - DNA, 273 bp, Zea mays
  Clone ID: LIB3180-048-P2-H10
atcgctcttgtccgacccgcgcggccgccggcagcccgtgccctcggagccgggttcctcttatcctctccgggaatggcgttggcgcgaggaccttgttgaattattttccatattactattattattttttttttaacataatatttatctctaatttatatttatattttaatagaattataattatatttttatcttattattatacttaatatattttaattattatatatatataatatacttttaattatttttttttataattat

SEQ ID NO: 29638 - DNA, 229 bp, Zea mays
  Clone ID: LIB3180-048-P2-H11
ttcgttcgttcagatcagcaaagcggcagtgcgtagagaggatcgtcgaacagagcagcatgaagatggtcatcgttctcgtcgtgtgcctggctctgtcagctgccagcgcctttgcaatgcagatgccctgcccctgcgcggtgctgtaggtcttgtacggtgcttatgccgttctgactactatttattaccttttaattttactttcttttattctattaattat

SEQ ID NO: 29639 - DNA, 303 bp, Zea mays
  Clone ID: LIB3180-048-P2-H12
ttgggttgacatagcaaaagcacttgccaggccagcttcctacacaaccaagtactttggatgtgagcttggtgcacagtccaaatttgatgagaagacagggatttccttggttaatggggctcatgatactgcaaagctggctggtctccttgaggtattcatcaagaagtatgtccaatgttatgggtgtgggaattctgagactgagattctcatcttaaagacccagatgatatcattgaaatgtgcagcctgtgggttcgtctcagatgttgatatgagggacatgcttacaacctt

SEQ ID NO: 29640 - DNA, 171 bp, Zea mays
  Clone ID: LIB3180-048-P2-H3
tttgtttctaacgctggcaccctcttacaactgcaacaattgctgccattcagggcagcttgctttgacaaacccaacagcattctaccaacaacccatcattggtggtgccctcttttagattttttatgagttatagttcaataataaagttttttgtttgatgtttgt

SEQ ID NO: 29641 - DNA, 237 bp, Zea mays
  Clone ID: LIB3180-048-P2-H4
acccacgcgtttgtgctctacctaccaacgagacgccggcgccatgggggccttcgcgaaggaggagcgccagttcctcgccgagctcggcctcgcgcagcgcaacccgggcgcgttcgcatgcggtgcgtggggcggctaaggtcccaccgtcaccttccacgagcccgaccaaccatcaggtcattgcagaggtcgtggaggtgtttgtgctcaacatctaatagttcttactct

SEQ ID NO: 29642 - DNA, 284 bp, Zea mays
  Clone ID: LIB3180-048-P2-H6
cccattcatttatattgtgcaatgtattgggtttagccagagctcctgttgataatggatgggacattgagcccatcacgactggacaagaggctactgtcagattgtattataacataaactcaagacctttagttcacagtactgagatatggatgcatggaggctataacaattggattgatggactctcttttgctgaaaggcttgttcatcatcatgacaaagattgtgattggtggtttgcagatgttgtcgtgcctgaaagaacatatgtattggac

SEQ ID NO: 29643 - DNA, 327 bp, Zea mays
  Clone ID: LIB3180-048-P2-H7
ttcttttatttatatacatggtcttaaactgaggggggataatttatgggtaggggaggccatttcttctaaaaaaatatttaagccatcaaatctgccttgttaatatgttaatcatactcgctttaaatatttccttcatttaaacttaactaattttcattattattttttgtatatctattactatgaatatgtttatatcatcataattttttatacattatttttatatcaatttaatttattataattaacttcttttttgttattatattttagttataatatttatatttatctaatataatataaatttatattatt

SEQ ID NO: 29644 - DNA, 306 bp, Zea mays
  Clone ID: LIB3180-048-P2-H8
tcgcccagcctctcctctccgcccgcggcccgcccgcttcttcttcctcgccatcccttcttctagcgcggaggcgcagatccatcgggcttcgggggctcggttccatccctctgccagctgggattggattggagcatcttcccagcaccacccacgcggaagccatgaccattcagttgctccgctgacgactcctctgactgacagcacggttgcgctgacctgcaggcctctcgcccacgctgccctgacagggtatagtcagggggtggcttttgttggttattttttctatattttttt

SEQ ID NO: 29645 - DNA, 296 bp, Zea mays
  Clone ID: LIB3180-049-P2-M1-A1
tctgctgagtgacatgaagctatggcctttcaaggtcatcccaggtcctggtgacaagcccatgattgtagtcaactacaagggcgaggagaagcagttcgctgctgaggagatatcctccatggtcctcatcaagatgaaggagattgctgaagcctaccttggttccaccatcaagaacgcagtggtgacagttccggcctatttcaacgactcgcagaggcaggccaccaaggacgcctgtgtcatttctgccctcaatgcgttactgttcatctacgaacatacatgtgctg

SEQ ID NO: 29646 - DNA, 200 bp, Zea mays
  Clone ID: LIB3180-049-P2-M1-A11
tcgctcgctccagaagaacagcgcgaaaaaatagacgaatttctcaaggagcttggtgaacactcatcataagccattaaagacttcctttcagatgccttgttagtgcgatttcttcgagcaaggaactgtaatgtgcataaagctagtaaaatgatgaaagcagctgttaagttgccgcttgcattcaaaccagaaaa

SEQ ID NO: 29647 - DNA, 379 bp, Zea mays
  Clone ID: LIB3180-049-P2-M1-A12
ttgagaaattgactccagcgccgcaaacggatgtatctactattggtgtggatgaggtgaaaggtttgaaaaattcaaattcggtgctgaagacagaccggaacatgccaggttccaatggttcatatggccggtctagtgtgcgttctggcagctatcagaaccagactagttggtcacactatccatattatagtagtgagatgttctctgacaagcagcatatagtcaccggcatccacaatttgactttcaaccctaaaaccaaggtgcagtcgaggaatcaaaacacgaggcagtattctcatctcatgggtttgcaaacaccaacttcatcatagcactcagctaatggaatttatgggtatgatgggagctt

SEQ ID NO: 29648 - DNA, 417 bp, Zea mays
  Clone ID: LIB3180-049-P2-M1-A3
tctccctaagcttgtgcacgcgcgcaccgtccctcaccgccggcctctgctcctcttgcgccgccgcaggatctcgtatcgccggagaccatgtaccgcgccgccgggagccacctccgctccctcaagcatcatggtgcttctaggcttgccagtacaagtgttgcgaagcagtcctcaggtggtctgttcagctggcttcttggtggaaaatcaagcgaactccctccccttgatgttccactcccaggcattagcattccctcacctctaccagattttgtagagccatctaagacaaaagtcactactcttccaaatggcgtcaagatcgcctcggagacatcatcgagcccagcagcatctgtgggtctgtacattgacctgtggttcaattacgaaacacctgcttcatct

SEQ ID NO: 29649 - DNA, 450 bp, Zea mays
  Clone ID: LIB3180-049-P2-M1-A4
tagggaagctggccgcctgcaccgccgcgcacattactggctcgaccgaacgcagtcctgtctttgtcaatcgcaaggtgaaccacttcgttcaagagttcaagcgcaagaataagaaggacataagcggcaacccccgtgcactgcgccggctgcgcacggtgtgcgagcgcgccaagcgcacgctgtcatcgactgcccagacgaccattgagatcgactccctgttcgagggcatcgatttctactccacgatcaccagggctcgcttcgaggagctcaatatggacttgttccggaagtgcatggaacctgtggagaagtgcttgcgcgacgccaagatggacaagagcagcgtgcacgacgtcgtgctcgtcggtggctccacccgcattcacaaagtgcagcagttgtctgaggacttttttaacgttaaggaactgttgcaag

SEQ ID NO: 29650 - DNA, 176 bp, Zea mays
  Clone ID: LIB3180-049-P2-M1-A5
tttagcacctacggcgaggtcctcgagtccaagatcatcctcgatcgggagacgcagaggtcccgcggcttcggcttcgtcaccttctccacggaggaggcgatgcggaacgccatcgagggcatgaacggctaggagctggacggtcgcaacatcaccgttaacgaggcccattc

SEQ ID NO: 29651 - DNA, 420 bp, Zea mays
  Clone ID: LIB3180-049-P2-M1-A6
tctttttaaggttgtaaaataataacacgaaaatcattgttcgaaaattccatttagcggcgccaaaaggtgaaatacaagtctcaggagcattactgatagttaagacaacagacaacagacacctgaagaggccgactctgcgctacccaaacaaacaggagacaccgcatcaaacagtccacgcattaacagcaacaaccgtatacacaacttttgtggcaagttattcaggcactgcaaaagcagacacggtatcgcataatttctttttggcggtctgtttttttatatttggtttctgtcgtagttctttttattctaacatcttttaagtcatattctttatactatgtttattttattttgtgtttaattttattaattatatgttttcagtatattttttttttaccttta

SEQ ID NO: 29652 - DNA, 371 bp, Zea mays
  Clone ID: LIB3180-049-P2-M1-A7
tccagccctgaggacgtcggcggcatgcacgcggctgccggaatcctcacagaaagaggtggcatgacctcccatgccgccgtggtggcacgcgggtggggaaaatgctgtgtctcgggatgctctgggattcgtgtaaatgacgcagagaaggttgtgaagattggaggcaatgtgctgcgcgaaggtgagtggctatcgctgaatggatcgaccggcgaagtgatcctcggaaagcagccgctctccccaccagccctcagtggcgatctgggaacattcatgtcctgggtggatgacgttagaaagctcaaggtcctggcaaacgcggatacccctgaggatgcattggctgcacggaacaacggggc

SEQ ID NO: 29653 - DNA, 247 bp, Zea mays
  Clone ID: LIB3180-049-P2-M1-B1
tgtttctcgtgggcgatgacgacgacgaggacgtggaggaagtggaacttgaggaggaggaggacgacgagaaggatctcgaggcaatgcgacgggccgaggaggaggagcgccgcgagcaggaggccgagacgaagactcgccgtcgtcggggacggcccaagcgccgtcgtgacccggttagcgaggatgaggagcccgaggagctagagctgcaaacggaggatccccgtgaggaggagatcac

SEQ ID NO: 29654 - DNA, 241 bp, Zea mays
  Clone ID: LIB3180-049-P2-M1-B11
tcctctccctcgccatcatcgtctccgcctccgccgctccccctcggtcccctccccacctcccgttctctccctccttggatagggttagagactgagctcccccgcacgcgcgcgagccatggtctccttcacctgttcccaggtcggctcgacggcagcggtcggagcctcgcccttcctcggctaccggtggcggagcggccccgggggagccaccccgttgagctccctcttcagt

SEQ ID NO: 29655 - DNA, 414 bp, Zea mays
  unsure at all n locations
  Clone ID: LIB3180-049-P2-M1-B12
gcaagtgagaggatcagaggaggcatccgtgaccaaagatcgagtagccaagaagaagagagatgaacgccgacttcggcgcgcccaaggagctcgcgggaggcctgcagcagcggcgggccctgtaccagccccgcctcccgccatgcctccagggaccgacggtaagggcggagtacggtgacgcgaccacaaccatcgatcccacctgtgcccaagccgtcgcgcaggccttcccgcacacctttggccagccgctcgtcagcttcgtcgcgccggccgccggcgccggcgccgttgaggagcgccacccgatcagggtggncgtggtgttctctgggaggcagtcgccgggagggcacaacgtcgtcttgggccctcatgacgcacttaaagcctacaatcctcagagct

SEQ ID NO: 29656 - DNA, 297 bp, Zea mays
  Clone ID: LIB3180-049-P2-M1-B2
tctgttaaatgatagacagcacatctaagggcatcaagggcactgatggagcagcggacaaggcaattgagaaggttgtggtcgattcatcaaaccttggtgattttgttgggaaacctgtgttccaggctgagcgtatatatgagcatactccagttggagtggtcatgggtttagctcggactgctatgggaggttctactttgtacttttaatcacattaaggttatgtatggtaagggattggatctttctttctttctagtcattttttttatttcatgttttgttattttt

SEQ ID NO: 29657 - DNA, 307 bp, Zea mays
  Clone ID: LIB3180-049-P2-M1-B4
tctctcacaccggtgccctagccgcaggggtgctcacctttttaatcaccctggccgagctttgtgtcatcgccaagggcccccgcaacgtcatactcaagaccttgctggtctcaacctccatcgtgttcgtcatcctcgcaggcgcagagtacacggggccgtctatgaacccagctaatgcatttggctgggcatatgttaacaattggcacaacacatgggagcagctgtatgtgtactggatatgcccctttattggggccatgcttgctggatggatatttagggtggtgtttctacctac

SEQ ID NO: 29658 - DNA, 372 bp, Zea mays
  Clone ID: LIB3180-049-P2-M1-B6
tcgctctttctacatggtatcagattagggtttccttcctatccacccacagccaccacccacccccaacagcagccgctagaaccgccggacaccgccgtcgttgccccccgggaggctcaaccttccctcccgggggcagccacaccccagtcgccgctccctagcagccgccgcatcctcccctctctctccagtcgccgcatggccactgcctcctcgtcgctccgcttcctcggcctgctcaagcaacccgacgacgccagctcccagtcccacggcatctaggcgctggagctcgacgagcgcgacgtcgtctggtcctccagcgcgacctcctcgtccttcgcggcctccttgccgttcccgacc

SEQ ID NO: 29659 - DNA, 363 bp, Zea mays
  Clone ID: LIB3180-049-P2-M1-B7
gccacagcgcccgttgttgtatcttgtcactgatcagtgttgtttgctttgctttgccgtgctaatggcgcccgctccatgtggccgttcgtcgcagagggtgttccacttcggcaagggcaagagcgagggcaacaagaacatgaaggagctgctgggcggcaagggcgcgaacctggcggagatggcgagcatcgggctgtcggtgccgccggggttcacggtgtcgacggaggcgtgccagcagtaccaggaggccgggcgcgccctcccgccggggctctgggcggaggtcctcgacggcctgcggtgggtggaggagtacatgggcgccgtcctcggcgacccgcggcgcccgctcct

SEQ ID NO: 29660 - DNA, 417 bp, Zea mays
  Clone ID: LIB3180-049-P2-M1-B8
tctcctattgttcgacaagagttttcgttgcttaggcaaaggccaaagcgggagcaaaaaggtttcgttggcgatggacagctcgtggacgcttactgaccacccgtagctccccaaggtgaatccggtggctgtcgtcgtgctggacggatggggctaggccaaccccgaccagtacaactgcatacatgtctctcagactcctgtcatggactcgttaaagaatggtgctcctgagaaatggagactagtgaaggctcatggaacagctgtgggtctcccatctgatgatgacatgggcaacagtgaagttggtcacaatgcacttggtgctggtcggattttcgcccaaggtgctaagcttgttgatcaagctcttgcctcaggaaagatttatgatggagatgggttcaacta

SEQ ID NO: 29661 - DNA, 419 bp, Zea mays
  Clone ID: LIB3180-049-P2-M1-B9
tgctgaagctcgcgcaaaagctgaaagagaggcccgccagggttcacagggggctgctgtgcatagggctcaacaggaaggctctgagacgcctgctgtcgacgccaagctacgagcaggtaggccagctgctgacgcaaggctgagacgcgtttggctaggcacaacccaggcctgttcatctggctacatgtgactcagactcctgtgacggactcagtaaagaatggtgctcctgagaaatggagactagtgaatgctcatggaacagctgtgggtctcccatctgatgatgacatgtgcaacagtgaagttggtcacaatgcacttggtgctggtcggattttcgcccaaggtgctaagcttgttgatcaagcttttgcctcaggtaaaatttatgttgacaatggttcaactca

SEQ ID NO: 29662 - DNA, 210 bp, Zea mays
  Clone ID: LIB3180-049-P2-M1-C10
ttcttttaaagaactagtgtattaattaatggtgttttaacacctcgactaggggcatgatttaatgtttccaatcataccttttaaatgccatgcattaactagcattgagcaaatttttaagttcattctcgtaaccctttactcccacttacttatactttattatgtcttaatatcatttattaccttaataattaattctttgtc

SEQ ID NO: 29663 - DNA, 341 bp, Zea mays
  Clone ID: LIB3180-049-P2-M1-C11
ttcttaccattccttccaacaccacctcgcctgcgatctccgtagccttcgtggcgtggagcatcgatcatgtcggcctactgcggaaagtacacggatgagctcatcaagaatgctgcctacattgtcacccctggcaagggtatccttgctgctgatgagtccactggcaccattgtcaagcgcctttccagcatcaatgtttagaacgttgtggtgaaccgccgtgccctccgtgagctcctattctgcttgtcctggtgcttctcagtacatcaacggcgtgaatccaatctagcagactttgtacaagaagagactggttggctcgcctttctttt

SEQ ID NO: 29664 - DNA, 308 bp, Zea mays
  Clone ID: LIB3180-049-P2-M1-C12
tccacgcgtccgctcgccgacgcagccatggcgatcacagcgccaactcccgacatcctcggcgagcgccagtccggccaggacgtccgcacgcagaacgtgatggcttgcggggcggtggccaacatcgtcaaatcctcgctcggccccgttggtctcgacaagatgctagtggatgatattggtgatgttacaatcactaatgatggagcaaccatacttaagatgttggaagttgagcatacagccgccaaggctctcgatgagttggctgagctccaagatcgggaggtaggagatggaactac

SEQ ID NO: 29665 - DNA, 212 bp, Zea mays
  Clone ID: LIB3180-049-P2-M1-C3
attttattctattccactaccacccatctcgtcgtccggcgattcgatccggttgttgcaacccaggggcagtgatggcgacgaataggagcgtgggcaccctactgggggtgggaactaatggtggtgtcaggtgggaaaacgcgccgacctaatgatctggtttatgtattgacaaagaatcagcgagtgcccgcgggtgaggtcattgg

SEQ ID NO: 29666 - DNA, 403 bp, Zea mays
  Clone ID: LIB3180-049-P2-M1-C4
gtgagtgcggcttcgatggcaagctggaggccctggagccgcgccacaaggtgcagtctgaggccggctccgtccagtacttcagccggttcaacgaagccgaccgggagctcacctgcgccggcatcttcgccgtccgcgtcgtcgtcgacgccatgggcctcctgctccctcgatactccaacgtccattcgcttgtctacatcgtccaagggagagggatcattgggttctcgtttccgggatgccaagaggagacccagcagcagcagtatggatacggatatggatatggacaccatcaccatcagcatgaccaccacaagatccaccgattcgagcagggcgacgtggtggccattccggccggttcccatcactgtctgtacaacgacggtgactc

SEQ ID NO: 29667 - DNA, 403 bp, Zea mays
  Clone ID: LIB3180-049-P2-M1-C6
ggagcgtcaaggatcattggtgtcgacctgaaccccagcagattcgaagaagctaggaagttcggttgcactgaatttgtgaacccaaaagaccacaacaagccagtgcaggaggtacttgctgagatgaccaacggaggggtcgaccgcagtgtggaatgcactggcaacattaatgctatgatccaagctttcgaatgtgttcatgatggctggggtgttgctgtgctggtgggtgtgccacataaggacgctgagttcaagacccacccgatgaacttcctgaacgaaaggaccctgaaagtgaccttctttggcaactataagccacgcactgatctgccaaatgtggtggagctgtacatgaaaaaggagctggaggtggagaagttcatcacgcaca

SEQ ID NO: 29668 - DNA, 401 bp, Zea mays
  Clone ID: LIB3180-049-P2-M1-C7
gaagccattccctcttcaagaggggatcatcagattgggcttattattccttattactccaggcaaggatcggagttgctctgaattgactgaaccatggcggcgacaatggcagtgacgacgatggtgacgaggagcaaggagagctggtcgtcattgcaggtcccggcggtggcattcccttggaagccacgaggtggcaagaccggcggcctcgagttccctcgccgggcgatgttcgccagcgtcggcctcaacgtgtgcccgggcgtcccagcggggcgcgacccgcgggagcccgatcccaaggtcgtccggtcggccgacaactgcgacatcgcgcgccagcttggcgccgccgttcccgggcagcatgccgcctgggaggcggaggaagaggc

SEQ ID NO: 29669 - DNA, 420 bp, Zea mays
  Clone ID: LIB3180-049-P2-M1-C8
gcaagaacttgtggatgagttaattgtatttgagcaccttgactatggtaaggatatagtgtttccaatcagacctttgaaatgccatgcatctactggcagtgtgcaaatttctggtgacattcggaaaaccttttgtcccactgatttgaactatgtaatgacaaagaatcagtcggtgcctgttggtagtgccattggcagtggctatccagtatatggtggcagactctctacttcagggaccatattcggttccattcagacagagattccttcgatccaaagttccagctatagcccaagtaatgactggttggctcaatgtccttcggcttgcattgagcaacggattccaatggaatgcaatacaatatctcagtcaaaagcttaccttatgatgcattcttcttcagcttt

SEQ ID NO: 29670 - DNA, 419 bp, Zea mays
  Clone ID: LIB3180-049-P2-M1-C9
gcaagaactagaggatgagtttattgtatttgagcacctcgactatggtctggatataatgtctccaatcagacctttgaaatgccatgcatctactggcagtgtgcaaatttctggtgacattccgaaaaccttctgtcccactgatttgaactatgtaatgacaaagaatcagtcctcgcctgttagtagtgccattggcagtggctatccagtatatggcggcagactctctacttcagggaccatattcgggtccattcacacagagattccttcgatccaaagttccagctatagcccaagtaatgactggttggctcaatgtccttcggcttgcattgagcaacggattccaatggaatgcaatacaatatctcagtcaaaagcttaccttatgatgcattcttcttcagctt

SEQ ID NO: 29671 - DNA, 390 bp, Zea mays
  unsure at all n locations
  Clone ID: LIB3180-049-P2-M1-D1
gtttaactgaaagatataaatccagcttccttctttgttttatagcatatttgtcaattttttatgtgaatggtgggggaggcccctacatgtatttcttcactaacagaagcaaagaaatatttacaatacaggaggctgtaggccaaaaaggtagagaaaaaacagaaaaaaccatatttgtatgataagctactcaaccaatcttttgtaagattctttatagaatatctctcttctcttcctattttccatattcgacttaatctngttaacacatgccaatgcttgtgtatccttgtttatacacagttctattcattgttgataaagcttatttgcataaacggcgtgagggatgtgctcgtattgccatgaacttacatagct

SEQ ID NO: 29672 - DNA, 404 bp, Zea mays
  Clone ID: LIB3180-049-P2-M1-D10
tctgtcgcttttatatgttttttgtttgatcgattggtgatgattgcaattgggcgcatctcttaatatatatagaggtacttaatatatttagagggaatgtctagatccatttctaggcatctcccgacagcaaccatggatttagaggaataaactcgcacgaaaaagaaattaatggtcaagccttaagggtcacaaatgatgcttaacacacatacaaacacacatctcatacaaaagtaaccatcatagacatcatttcttcaacacgctcccaaccggcaccatccgcctcttgtagctcaccaccaccttccctctcgccttcggcgaaagctttatccaatcggtccgagggaacggtgacaccagcttgagctcgaagttcctgagcaggtggc

SEQ ID NO: 29673 - DNA, 344 bp, Zea mays
  Clone ID: LIB3180-049-P2-M1-D11
tcgctggaaacaagcttgccatgcaggagttcatgatcctcccaactggtgcctcctcgttcaaggaggccatgaagatgggagttgaggtgtaccacaacctgaagagcataatcaagaagaagtacggtcaggatgcgacaaatgttggggatgaaggtggttttgcacctaacattcaggaaaacaaagaaggccttgaactattgaaggcagccatagaaaaggctggctacactggaaaggtggtcattggaatggatgttgctgcttctgagttcttcggtgagaaagacaagacttatgatcttaatttcaaggaggagaacaacgatggctcaaac

SEQ ID NO: 29674 - DNA, 407 bp, Zea mays
  Clone ID: LIB3180-049-P2-M1-D12
cctgtacagatgttgagactggatcgaaagtcagcgaagacactcaacgacaaccccttggtgaagatgtcggcgaaccgcagcgtggtggggacgctgtgaacccgaacgtcacaatcggcgacccgctcgcggacaaagtgcaggtggcaagtgcaacagcaacattcgtgatgatgttctcctcctccctctctgtggtggagttttacttcctgcacagattccccctgccttttgctggctacctcatcttcatttccatattggctggattctggggccagtgtttggttaggaagatcgtgcatgtgctcaagagagcatcgcttattgtcttcatcctctcctctgttatcttcgtcagtgctcttacgattggtgtcgttggaacccaaaagagcatt

SEQ ID NO: 29675 - DNA, 412 bp, Zea mays
  Clone ID: LIB3180-049-P2-M1-D2
tgttcattacaatgctattatggatgctgttcaagaagttctccctgaagttagacatcgcctttgcctgtatcgtattatgaaagatgtagcagagaacttgaaagaacatgcagagtttaaaacaataaataaagcactgaagaaagtaacatatggatctttgaagataccagagtttgaaatggagtggaagaagattatcgaagagcatggacttggaggaaacgagtgcctcagttccctttatgagcaccgccaactctgggcacctgcatatctgagagataaattctgggcagggatgtctatttcacagcgaggggagtctatttcctcgtactatgatgggtttgtgtacccaaaaacttctttgaagcaattttttagtaaatatgagatgatattagag

SEQ ID NO: 29676 - DNA, 417 bp, Zea mays
  Clone ID: LIB3180-049-P2-M1-D3
gcctgagctcgacgaggacgaccgacgacgcacgcagagatccggcgtactgcaaattttgaaaactgaactgtaagatggcatcagcagagctttcccgtgaggaaaatgtgtacatggcgaagctcgccgagcaggcggagaggtacgaggagatggttgagttcatggagaaggtagccaagactgttgactcggaggagctcactgtggaggagcgaaacctcctgtctgttgcatacaagaacgtcattggagcccgccgcgcctcatggcgcatcatctcctccatcgagcagaaggaggagggccgaggcaatgaggaccgagtaacactcatcaaggattatcgtggcaagattgagactgagctgaccaagatctgtgatggcatcctcaagctgcttgagacccatc

SEQ ID NO: 29677 - DNA, 392 bp, Zea mays
  Clone ID: LIB3180-049-P2-M1-D4
gcgttctgaaagggagcgaggattgggaagctgatgtaatggataagtattctattggaaaagaaggcaaatctaaaaatattgatccagttaggaaggatgattcagtagcaatcttagaacagttctttggcaatgttttatcgaaaagcggcagcaacctaccaacttatgttgagaaccagccattgaaaactgatgatgacatgatcacttctgtgccagaatcatccaaatttgctcattggtttcttgatgaagacttgaaacctgcagaagacttatcttcaaagagcctgctctccatgattgtcaaaaatgaaaattcaggtctagaaaatttaaaccatactcctttatctgatgctgctgcccagaatttttcccaagag

SEQ ID NO: 29678 - DNA, 420 bp, Zea mays
  unsure at all n locations
  Clone ID: LIB3180-049-P2-M1-D5
ggcccatcagcgacaacgccggcggcatcgcggagatggccggcatgccgcaccgggtccgggagcggacggacgcgctcgacgccgcgggcaacaccacggccgccatcggcaaaggcttcgccatcggctccgcggcgctggtgtcgctggcgctgttcggcgcgtacgtcagccgcgccgggatcacggcggtggacgtgctgagcccgcgtgtgttcgtgggactcctcctcggcgccatgctcccctactggttctcggcgatgaccatgcggagcgtcggaagcgcggcgctgaggatggtggagaggtgcgccgccagttcgacaccatcccgggcctcgccgagggcctcgccgtgccggactacgccacctgcgtcaggatctncaccgacgcctcgctcaagaagatgat

SEQ ID NO: 29679 - DNA, 358 bp, Zea mays
  Clone ID: LIB3180-049-P2-M1-D6
ggactttgcaaggaggttgaattcagtttggagcgagtcacatattggtggtaatggttctgtgcagagatttcctgggtttaatcacaggtgagtgttaagctggcaagatctgaaggtagaagcagaggagatttgtgggcatacagcttggaagggattaaaggccaaacaggccaccttggctcctgtgtgttgtaaaaccttgataactcaggaaccaagcatgcagaaatgcgcaagttcccttggccattttcctgggaaggaggccacctagttgggatgaccctttttttttctttgggaagggagggttagaggtctgtcttgactcaattttttttttttcttaact

SEQ ID NO: 29680 - DNA, 415 bp, Zea mays
  Clone ID: LIB3180-049-P2-M1-D7
gttgtctctctctctctgtctctctctctctcgtccccctctcgctctcagacgaccggtgggccgccgccgccgccctaagccaggtgctgaggctcttgttggtctcttcgccagcgaggagcacccagcaggacaaggcaacaggctgttggaatatggaccaacaaggcatgcatgaccatgaaggggtccacgttgttggatttgaagtcccgccttcaccggattccagctacgacaaccctgttcctgggaatgaagacgaaggccgggagcccccactgatgccacctcatctgcagcacacgctgctgagcttcccaccaagccaagacgagtcgagcccgctgccccagccccagaccgtggttctgaaccacctttacatcgagaaagagaacacgaggtccat

SEQ ID NO: 29681 - DNA, 295 bp, Zea mays
  Clone ID: LIB3180-049-P2-M1-D8
gatcgattgttgatgattgcaattgaccgtatctcttaatatatatagaggtacttaatatatttagagggaatgtctagatccatttctaggcatctcccgacagcaaccatggatttagaggaataaactcgcacgaaaaaaaaattaaaggtcaagccttaaaggtcacaaatgatgcttaacacacatacaaacacacatctcatacaaaagtaaccatcagagacatcagttcttcaacaacgctccaaacgggaccatcccgcctttgtagcttaacaacaactttcct

SEQ ID NO: 29682 - DNA, 399 bp, Zea mays
  Clone ID: LIB3180-049-P2-M1-D9
gatcgattggtgatgattgcaattgaccgtatctcttaatatatatagaggtacttaatatatttagagggaatgtctagatccatttctaggcatctcccgacagcaaccatggatttagaggaataaactcgcacgaaaaagaaattaagggtcaagccttaagggtcacaaatgatgcttaacacacatacaaacacacatctcatacaaaagtaaccatcagagacatcagttctccaacacgctcccaaccggcaccatccgcctcttgtagctcaccaccaccttccctctcgcctccggcgaaagcttcatccaatcggtccgagggaacggcgacaccagcttgagctcgaagttcctgagcaggtggctccatatcaccttcacctgcat

SEQ ID NO: 29683 - DNA, 422 bp, Zea mays
  Clone ID: LIB3180-049-P2-M1-E1
tctgctgttcgaaggtcagtggctgtcgctgaaggggtaagactagcgacgtgcaccatgttaagctatcagcaatcaaatcaaaggcacattgtctatttctagccacaagaatgtctggctgaatggacagaccaagatacagagagctaatggcgataactcgatcccagcaagcgaagactgatcatcgcacaagaacacaacgtgttggattatgactaacagagcacatgttctaagagttagacgagaggatcaaagtctggaaacagatgattatgtctcccacacttgagcggaggcaccatgcgctcgaccgtctcttgacgtatcagaggtctgacttttaaggcattttccgtgctatgtatggtctcccggtgaccatccgactactggcccttcccttcacgagtttc

SEQ ID NO: 29684 - DNA, 370 bp, Zea mays
  Clone ID: LIB3180-049-P2-M1-E10
ctgactcgtgggctgtgaacaggagctatatcagaggttggtccatgagttgctggataaacagcagaatccgaccgtaaaatcaaggctgtgcatctgcgttccataaccttacaagttcaaacaatctctcaagctcactcgaccggtcaaacaggcagagattcatgaaaaacctccttagcttcatggcggatgtatcggtcttcatgcagataaagttgatgcgttggcagggaacaggtgatgtttgaccggtcaattaaaccccgaggaagcactgcaccactgtggttggggcgcatgtgggcaccacttgtctgtggattgatgagtgcgaagtctgtcacgacaagtctaatttttcttg

SEQ ID NO: 29685 - DNA, 397 bp, Zea mays
  Clone ID: LIB3180-049-P2-M1-E12
ctacatttcttctctctctgctcctccgcctccgcctgatccatccaagacagggatcgccatgtcggactcggaggagcaccacttcgaatcgaaggccgacgctggggcgtccaagacctacccgcagcaggctggcaccgtccgtaagaacggcttcatcgtcatcaagaaccgtccctgcaaggttgtggaggtttctacctccaagactggtaagcatggccacgccaaatgccactttgtcgccatagacatattcaatgggaaaaagcttgaagatattgttccttcatcacacaactgtgacaatccgcatgtgaaccggtctgagtattcagctgattgatatttctgaggaaggatttgtgagccttcttactttaaattggcacac

SEQ ID NO: 29686 - DNA, 61 bp, Zea mays
  Clone ID: LIB3180-049-P2-M1-E2
cccttgtactttttgccccacttcgaaaagggcatgggctagttcatcaagaacgaggagc

SEQ ID NO: 29687 - DNA, 342 bp, Zea mays
  Clone ID: LIB3180-049-P2-M1-E3
ttttacgtacacgactgctcgtcttggatcctttagggttctaactaacaaagcagttgaaaagaatgaagggaagccattgcctctaattcagaaagcttttattggtctgactgctggagcaattggtgcttgttttggtagtcctgctgacctacaagtaattagaatgcaagccgactcgaccctgccagctgcacaacgacgcatctataagaatgctttccatgcactctaccgtatcagtgctgatgagggagtccttgcgcttcggaagggtgcaggttcaactgtggtgagagctatggcactcaatatgggtatgcttgcttcctatgacca

SEQ ID NO: 29688 - DNA, 431 bp, Zea mays
  Clone ID: LIB3180-049-P2-M1-E5
tcttcatcatagaaagtggaatccagtagcaacaatagagcaacaatggcgaccaagatattttccctccttatgctccttgctctttctgcatgtgttgctaacgcgacaattttccctcaatgctcacaagctcctatagcttcccttcttcccccataccttccatcaatgatagcttcagtatgtgaaaacccagctcttcaaccctataggctccaacaagcaatcgcagcaagcaacatacctttatcacccttgtttcaacaatcgccagccctatctttggtgcagtcattggtacaaaccatcatggcacaacaactgcaagaacttgtgctacctgtgatcaaccaagtagctttggcaaacctttctccctactttcagcaacaacatttcttttcatttaaccaactggctacattgaa

SEQ ID NO: 29689 - DNA, 313 bp, Zea mays
  Clone ID: LIB3180-049-P2-M1-E6
taaaaactgaaagatataaatccagcttccttctttgttttatagcatatttgtcaattttttatgtgaatggtgggggaggcccctacatgtatttcttcactaacagaagcaaagaaatatttacaatacaggaggctgtaggccaaaaaggttgagaaaaaacagaaaaaaccatatttgtatgataagctactcaaccaatcttctgcaagattctttatacgaatatctctcttctcttcctattttccatattcgacttaatcctgttaacacatgccaatgcttgtgtatccttgtttatacacag

SEQ ID NO: 29690 - DNA, 413 bp, Zea mays
  Clone ID: LIB3180-049-P2-M1-E7
gttcttgcacaaggtcagagctggaggctgaaagtaagcaaacagacaacattttggagtataagcaatcaactcaaaggcacttgtctattcctagccacaagaatgttgagctaaatggacagaccaaaatacaaagagctaagggtaataacttgatcccagcaagcgaagacgatttatcgccaaagaaaagaacgtgtttgaatgagaataattctgagagagcttcaagagatatggagctagtccacattatggaaaatcagcagaagtataacacacagtgggaggtggatactatgagaacaacatctaggggaaatgatgagaagggctccatcccagcacatcagttggagctttctcttagaagaactgactacggaaaattagagaaccacgagaaaaat

SEQ ID NO: 29691 - DNA, 413 bp, Zea mays
  Clone ID: LIB3180-049-P2-M1-E8
cggacgcgtgggctgtgaacaggagctatatcagaggttggtccatgagttgctggataaacagcagaatccgaccgtaaaatcaaggctggcaactgcgttccataaccttacaagttcaaacaatctctcaagctcactcgaccggccaaacaggcagagattcaggaaaaacctccttagcttcatggcggatgtatcgggcttcatgcagataaagtagatgcgatggcagggaacaggtgatgtttgaccggtcaattaaaccccgaggtagcactgcaccactgtggtaggtgtgcatgtgggcaccacatgtctgtggattgatgagagcgaagactgccacgacaagtctagtagatcttgaagagctagtgtcaccagaaaagacagggagatgagctagtctt

SEQ ID NO: 29692 - DNA, 420 bp, Zea mays
  Clone ID: LIB3180-049-P2-M1-E9
tctgactcgtgggctgtgaacaggagctatatcagaggttggtccatgagttgctggataaacagcagaatccgaccgtaaaatcaaggctggcaactgcgttccataaccttacaagttcaaacaatctctcaagctcactcgaccggccaaacaggcagagattcaggaaaaacctccttagcttcatggcggatgtatcgggcttcatgcagataaagtagatgcgatggcagggaacaggtgatgtttgaccggtcaattaaaccccgaggtagcactgcaccactgtggtaggggtgcatgtgggcaccacatgtctgtggattgatgagagcgaaaactgccacgacaagtctagtagatcttgaagagctagtgtcaccagaaaagacagggagatgagctagtcttagggtt

SEQ ID NO: 29693 - DNA, 373 bp, Zea mays
  Clone ID: LIB3180-049-P2-M1-F1
gttcttgcctcctgcatctctagagaggcacatcccagctccaagcttcgcgccttgttggatcgtggcgtccaagcaacggtggtagcggagcgcgaggcagtggccgcagaaggaagcgcgaagcatccatggaccaacgccaggtggttagcgagaattatgccaatcccataacatgcttcttccatgtgctattcaaggcgggggcgctagccttctacatcctattctcgctctttgtgaagagcttcgtcatcatcttcgtgatcacggtgctcctcgcagcgcttgacttctgggtggtgaagaacgtcagtggcaggatactagtcgggctgcggtggtggaatgagatcgatgatgacggtaa

SEQ ID NO: 29694 - DNA, 407 bp, Zea mays
  Clone ID: LIB3180-049-P2-M1-F12
ctcctcccgttgtcagccgccgtgcctgttctctctgcctttctaaaagtgcggcgactggttgggctgccgccgactgccggggccttcgccgacctcttcgccggcgaagaggtcccatcaggagaaggagtagatcgtcgacccagaaccctcgctgatggcgactttcgcgaaacctgagaacgcgctgaagagagccgaagaattaatccatgttggtcaaaagcagtcagccctgcaggctttacatgatctcattacctcgaaaaggtacaggtcatggcagaagcctctcgaaaagatcatgatgaagtatgtagaactctgggttgacctgaggaaaggcagatttgcaaaagatggtcttattcagtataggattgtctgccagcaagtaaacgtgt

SEQ ID NO: 29695 - DNA, 420 bp, Zea mays
  Clone ID: LIB3180-049-P2-M1-F2
tctatctagcaacatagaaagcacaatagtgtaccaacaatggcagccaaaatattttgcctccttatgctccttggtctttctgcaagtgctgctacggcgaccattttcccgaaatgctcgcaagctcctatagcttcccttcttcccccgtacctctcaccagcggtgtcttcggtatgtgaaaacccaattcttcaaccctacaggatccaacaggcaatcacagctggcatcttacctttatcacccttgtttctccaacaatcatcagccctattacatcagttacctttggtgcatttattggcacaaaacatcagggcacaacaactacaacaacttgtgctagcaaaccttgctgtctactctcagcaacaagcagttcttccattcaaccaactagctgcattgaactct

SEQ ID NO: 29696 - DNA, 306 bp, Zea mays
  Clone ID: LIB3180-049-P2-M1-F3
tcttctgagtcgagacccaggcagccaggcttgcagttccagccccacctggccggtaccctcctcaaaccctacaccacgccccccggcccccagcccccggccttcgcccaacccgatagcgtagcgccggcgcagaaccggaccctgccgtgcggttgtccaccccgctcggcgccgtccgccgccgccgccgcctttgatgtctcctacctgcgacctcggcttcctctgcccccggtcgcagaagagctcccaagaggtcccccgagccacccgtttcggcggccagcggttggctttccc

SEQ ID NO: 29697 - DNA, 360 bp, Zea mays
  Clone ID: LIB3180-049-P2-M1-F4
caaaagcgaagcaaagcaatcggaattctctgcgatttctctagatctcgactaccccccactagttttggttcctcctttcgttcgagagagcgattctggtggcaatggcgaagagcgagggtccggcgatcgggatcgacctcggcaccacctactcgtgcgtcggcgtgtggcagcacgaccgggtggagattatcgccaacgaccaggggaaccgcaccacgccgtcctatgtcggcttcaccgacaccgagcggctcatcggcgacgctgccaagaaccaggtcggcatgaaccccaccaacaccgtcttcgatgccaagcggttgatcggcaggaggttctctgatccgtcag

SEQ ID NO: 29698 - DNA, 326 bp, Zea mays
  Clone ID: LIB3180-049-P2-M1-F6
cgatctcgtttcaaatccatccatcctcgtttcctccgtcccgcagcatctcaaccccatggccaagatcaagatcgggatcaatgggttcggcaggatcggaaggctggtggccagggtggccctgcagagtgacgatgtcgagctcgtcgccgtgaacgaccccttcatcagcaccgactacatgacctacatgttcaagtacgacactgtgcacggacagtggaagcaccatgaagtcaaggtgaaggactccaaaacccttctctttggtgagaaggaggttgctgtgtttggctgcaagaaccctgaggagatcccgtggg

SEQ ID NO: 29699 - DNA, 378 bp, Zea mays
  Clone ID: LIB3180-049-P2-M1-F7
gtcctgctagcttgagagctctggtacggtgtagcaaggtacgggagagagagagagtagcaaactagctagggcacagggcagggcaggggccggctgcattatattgggatcggatctgggggcgaccgagctagcatcagctgagagaagagagagggggcaatatataatggtgttgttgtcgctggaggcgttgaggaagaggaacgtggccggtccgctgctgctgttcaacctcgccctctacgtctccatgttggggttcgcgagctgggcgctcaacgccttcgtcgaccacataggcgaccaccaatactacgacccacctgcaggcgacgcgtgcacgtgcatggacacgcacacgcctgcatgagc

SEQ ID NO: 29700 - DNA, 414 bp, Zea mays
  unsure at all n locations
  Clone ID: LIB3180-049-P2-M1-F8
ctaaatcccgtcccccaattccattctcggaagagaccatttccttcctcctgatctctcacggagttcctctccatggcgacgccccgctctccgagcccccgcgccgaagcgcccctcgattccgcgccgctgctgggcggtgcctccggcggcgggagccgtcgccgaggcggagcgctccgccgaccctcgcntcgcggtgcggcgcggctgctgcgccgcggcgggcggcgagccatgcgggagccctcggtgctggtgcgggaggcagccgcagagcacctggaggaacggcaggcggactgggcctactcccgccccgtcgtggcgctcgacctgctctggaacctcgccttcatcaccgtcgctgcggtcgtgctcgtgctcagccgcgacgaggactcgcccatg

SEQ ID NO: 29701 - DNA, 351 bp, Zea mays
  Clone ID: LIB3180-049-P2-M1-F9
tctgactcctgcgaattaactagacagttggaagagaccatcaactttgtgaccttcaatgacggatatgctttacatggctacgatactgtctcagagccatcagacccaaacactcttggttctaagactcgtgcatgacgtgcactgcggatgcgatagcaacatgacaagccatgatcgctcatgtccaccctcgataggatgtgaagatcacacgctgatccaatgggtcatctgaggctatccctagcgctccgtcattaaatgattatcaccaggaccataactcaagtaaccatgatgattactgggcctagtgataactcaaatttgaccaatagctgatct

SEQ ID NO: 29702 - DNA, 205 bp, Zea mays
  Clone ID: LIB3180-049-P2-M1-G1
tatatggatgatttaaaatgtattcttcacaacttgggatatcctgcactatggagggccatgtacctctaggcccaagacgggatcgcggagagcgtctccccaaaggacaagctcatcatctatcccatgttcgtgaagatagctgacacgtaatctggcacaggttgcgcctcgtgagccactcgaagttgaactacgctat

SEQ ID NO: 29703 - DNA, 123 bp, Zea mays
  Clone ID: LIB3180-049-P2-M1-G10
ggtccaactggcctgactaccgaggtgaagtctgttgagatgcacgacgaggcacttcaggaggctcttcctggtgacaattgttgcttcaacgtgaagaatgttgctgttaaggatctcaag

SEQ ID NO: 29704 - DNA, 395 bp, Zea mays
  Clone ID: LIB3180-049-P2-M1-G11
tcgtcaacgtcaccgagctacagccctacatctacgagctacagtcctacatctccgagctacaatccttcatcagccaagtacagcccttcacatgcatactctccaagcagccccaggatgagtccatacagccagacttctccaagctacagtccaacgtcaccgacttactctcctacatcaccatcatattcacaaccaagtccatcgtacagcccaacgagcccgttcaacacctctggaggacccagcccagactacagcccgacctctccaaattacaggcctagcggaagctactcccccactggaccgggctacttcccgtcgtccacaggccagggtaatgacaaggttgataagagcgctcgttgaagaggcacaggagaaca

SEQ ID NO: 29705 - DNA, 419 bp, Zea mays
  Clone ID: LIB3180-049-P2-M1-G12
tcgggagcctctccttcccggtctcctccgcccgttgccttcgtcccctccatctccggctgcgacgccggcgagcccgacaccgcgaatcggatccgccgacaaggcgagagggaagagatggggctcacgttcaccaagctgttcagccggctgttcgccaagaaggagatgcggatcctgatggtgggactcgacgccgccggaaagaccaccatcctctacaagctgaagctcggcgagatcgtcaccaccatccccaccatcggattcaatgttgaaactggggagtacaagaacatcagcttcactgtctgggatgtcgggggccaggacaagatcaggccactggggaggcattacttccagaacacccaaggtctcatctttgttgtggacaggaatgatagggaccgtgt

SEQ ID NO: 29706 - DNA, 63 bp, Zea mays
  Clone ID: LIB3180-049-P2-M1-G2
ataaggaagcggtacgctgcagtaccggtcggaatcgggtgacagcgtcggttttaaaggaag

SEQ ID NO: 29707 - DNA, 427 bp, Zea mays
  Clone ID: LIB3180-049-P2-M1-G3
ttttcaatgttaaaggtccctggttatgccaatcctgtacagtttggtgtattgatatcttttgcctatccgctcgaggaaggacttggtgagattgttgtagcaaccaccagaatagaaacaatgctgggtgatacagcaatagccgttcaccctgaggatgaaaggtataaacatctgcatggaagatacgcagtccaccccttcaatggccgaagactcaaaataatctgtgatgctgagttagttgatcccacttttggtactggggctgtcaagattacccctgcccatgatccaaatgactttgaagttggaaagcggcataaccttgaattcatcaatatcttcacagacgatggaaaaataaatagcaatggaggtgcaaaaattgatggaatgccaaggttcaacgttcgagttgctg

SEQ ID NO: 29708 - DNA, 152 bp, Zea mays
  Clone ID: LIB3180-049-P2-M1-G5
ttttctgtggttgacactgacagaggtctgcagagactatcggttattgctgcacggctttccctaaccctatccccactccacaccaccttccattggatcctaacctcctttcttccatgcgtccctgtatctccttttctctacttgtc

SEQ ID NO: 29709 - DNA, 411 bp, Zea mays
  unsure at all n locations
  Clone ID: LIB3180-049-P2-M1-G7
actcccgaaaccaggcaggagggaggaggcgacgacatcgccatcacaccagatcactgaagaagagagaggcgcgtcgagtctccccaaagaacgagctagtacaaagtctcctcttcctttgactccgaatcccctagaccattgatggttgcgggggcaccggaaggagccactgacgatgggcctctgctcctcctccaccgccgcccgggccgcctccgaccccggcgccgcagccgcgggtgatgccgccgcggcgaagaaggggcgcgggatcgtcgcgtgcgggaagcggaccgacttcggatacgacaaggatttcgaggtgcgctactcgcttgggaagctgctgggccacggccagttcggctacacctttggcgncgtcgatcgcgccttcaccgagcg

SEQ ID NO: 29710 - DNA, 256 bp, Zea mays
  unsure at all n locations
  Clone ID: LIB3180-049-P2-M1-H1
tgtttacgcgtgggtcgcgagcggccgccctgtggtttttttttttgggggggagggaaagacgatatnnncgttacatatatatttatgatgcgggaaacctataattagatttagattggcgataaatagtgccgagtgagaactctctcaggagtccaaccataaacaattctctttactacatgtgagcaagaaagttacaggtatctatattttaccaccaagaccagttatacctacaaaagcttttcct

SEQ ID NO: 29711 - DNA, 337 bp, Zea mays
  Clone ID: LIB3180-049-P2-M1-H11
tcgttgaaccaagcttggacactaccatctgcatttgacaacaaaggaaactacgtgatcagcttgagccaattggtgcgttggatggccacaaaagctgaagagttgggtgttgaagtgtatccaggttttgctgctagtgaggtatcatcattattcattttagaaacccttatgtggaaggactaatatctctctgaattcttctctaacagataatttatgatgaaaatcaaatagttacaggagtcgcatccaatgatgttggtattgctaaggatggtgccaaaagggaatcttttcatcctggtgttgaactaagaggcatgtaaacttt

SEQ ID NO: 29712 - DNA, 420 bp, Zea mays
  Clone ID: LIB3180-049-P2-M1-H12
tcgggaaaagctaacgaaattcatactgaactgtcaggacaaagagaacggcggcatttcagatagaccagataatgcagtcgatatctatcacacgtactttggaattgcagggctttcattaatggagtaccccggggtgaagcctttggatcctgcctatgcactaccattgcacgttgtcaatcggattttcttgaaaaaatagaacattccattcgatctgcggcgcagagatatgctgagatggcgctgtcagatgtggacgctacttcacagaaccacgattcgacggagaaatagctgagggggaatcaattacaggaacatgttgggataccataatcttggacttgaattctcgcattggctgtgggcgcttagtcgatgttttttttgtcatttggcacttggcctgtt

SEQ ID NO: 29713 - DNA, 399 bp, Zea mays
  Clone ID: LIB3180-049-P2-M1-H2
atcccaccggaccagcagcgtttgatcttcgctggcaagcagctggaggatgggcgtacccttgctggctacactcatcacactaagtgagcacaccacaaccggtaccaatgggatcggcaggatcggaaggctggtggccagggtggccctgcagagcgacaacgtcgagctcgtcgccgtgaacgaccccttcatcagcaccgattacatgacctacatgttcaagtatgacactgtgcacggacagtggaagcaccatgaggtcaaggtgaaggactccaagacccttctcttttgtgagaaggaggatgctgtgtttggctgcaggaaccctgaggagatcccatggggttccgttggcgctgaatatgttgctgagtctactggtgttttcac

SEQ ID NO: 29714 - DNA, 401 bp, Zea mays
  Clone ID: LIB3180-049-P2-M1-H3
gaaacatgtcggaagataaaagcactacatctgtatgactgcttgagagctaacaaagcaacttctgcctggggtgttgaggctcgtgttccattccttgacaaaagtttcatcagtgtagcaatggacattgatcctgaatggaagatgataaaacgtgacctcggtcgaattgagaaatgggttatccgtaatgcatttgatgatgaggagaggccctatttacctaagcacattctctacaggcaaaaggaacagttcagtgatggtgttgggtatagttggatcgatggattgaaggaccatgccagccaacatgtctccgattccatgatgatgaatgctggctttgttacccagagaacacacccacaacaaaagagggtactactacagaatga

SEQ ID NO: 29715 - DNA, 414 bp, Zea mays
  Clone ID: LIB3180-049-P2-M1-H4
cttcctccttcgaggagggaatttagggatatctatgtgatctttgagttgatggagtcggatctccatcaagtaataaaagcaaacgatgatctcacagcagagcatcaccagttcttcttgtaccagctgctccgtgggatgaagtacatccatgcagcaagcgtcttccatcgggatcttaagcccaagaatattctagccaatgctgactgcaagctgaagatttgtgattttggccttgcccgcgtttcattcaatgacactccatcagccatattctggacggattacgtggccactagatggtatcgagctccagaattatgtggctcctttttttcaaagggaagaatgttgtgcatcagttggatcttatgactgatctacttggtacaccttcagcagagtcta

SEQ ID NO: 29716 - DNA, 324 bp, Zea mays
  Clone ID: LIB3180-049-P2-M1-H5
tcgttgacttgtatgctgcaaccaaggccaagttgaccgtggtgaatttgaacaagaacagtgccctgcgtctgtatgaacccttcagcactgacccccagttttatgtgtatggttatgaggatctggagctgcagcctggggagaacgccacagtcaccttcgttttcttgccaaagttgttaggctcttcatcagctcatctagttgtgcagacaaattttggcggatttattatacatgcaaagggcatggctgtcagttcaccctatcagatactggcattgacagggttagatgttcttataggtggacagtttgaga

SEQ ID NO: 29717 - DNA, 365 bp, Zea mays
  Clone ID: LIB3180-049-P2-M1-H6
tctattccacatttacatgacccgcaatgggaggataagcatggctggtgtaacgacaggaaatgttggttacctagcaaatgcaattcatgaggttaccaaaccaaattgagttagggtgctaccttctttggtcgatggaagctgatggaatgagactgtgaagcggcgtttccccccctctgttcctgacagaaataagtttagcctgctgctaccatatacatggacacagactcacatgtagacactcaagttttgagagctgtgatcctgtttcatttaatcaaaaacaattttgtttttttccattttgtcatggcaaatgttacaccagctgcaaaataattacaataattgatctt

SEQ ID NO: 29718 - DNA, 423 bp, Zea mays
  Clone ID: LIB3180-049-P2-M1-H7
gtttcagtttggcacctccgaagcttccgtccgaatctctgctgcctccttcctcggccaggcttgcgggcgatggcggcggagcagaccgccgagcagttccggggccaggcgcggctgccccacttcgcgtccccgcggcgctacgacctgcgcctcacgcccgacctccccgcctgcgtcttcactggctcggtggcggtttccatcggcgtggccgcgcccacccgcttcctcgtactcaacgcagccgagctcgacgtcgcgaccgggggcgtcagcttcgcgcctcagggctccgaccaggtgctacaacctttggaggttaccaacgtgccagaagatgagatcctgattattcgcttcaatgaggtgctttctatcggggagggaactttgacgattgcattcaaggggactttg

SEQ ID NO: 29719 - DNA, 93 bp, Zea mays
  unsure at all n locations
  Clone ID: LIB3180-050-P2-M1-A1
ccctgcangtatgcggacgcatagcgcgaaggcannaacgcctctgcccgntacccgaaaaacttgatgaccaccgccgaaccggcgcgagag

SEQ ID NO: 29720 - DNA, 159 bp, Zea mays
  Clone ID: LIB3180-050-P2-M1-A12
tcgcaagaagcagccatctgtgcaacaaggggttgatgagataggcacatggaaccacgagaaaggaaatcccacaaagaggagaaagaacatcggaaaagaagagacgaacaggcacgatagaggaccagaggagaaaacaaaaacaagagagaaaag

SEQ ID NO: 29721 - DNA, 328 bp, Zea mays
  Clone ID: LIB3180-050-P2-M1-A7
tcggttggagcaaggagcacgacgcgatgggccactccaacgtgtggaactcgcaccctaagaactacggccctggctcccgcgtctgccgggtctgcgcgaaccctcacggtctgatcaggaagtacgggctcatgtgctgcaggcagtgcttccgcagcaacgccaaggacattggtttcatcaagtaccgttgaagaggccactgtgctgctgtggagaacttcctacatcaaagaaatgggtccttcattagaaggcctaatttatgcgctttagctttttgttcagaacttgagactcatgtgttaaactcgacttgtaaagt

SEQ ID NO: 29722 - DNA, 222 bp, Zea mays
  Clone ID: LIB3180-050-P2-M1-A9
tgtttttttttcctcctggaatccacgatcatggaacatgatgcgttcaagaacatccccattataatgatgtcatcgcatgactcagtaagcattgatttcaaatgcatgctaaagggtgcagcatattttcttgtttagccgataagaaagattgaattaaggaacttgtggcatctcgattggagaaaaacaacatgctaacggtagtcctaatgctta

SEQ ID NO: 29723 - DNA, 117 bp, Zea mays
  Clone ID: LIB3180-050-P2-M1-B1
tttgtctggtacaacactcgacttcttgtcacaagggatacaaacccattcacggggtcttggatcacttatcacaatgcgatgataatcatagaacaaatcctagattgtagacac

SEQ ID NO: 29724 - DNA, 232 bp, Zea mays
  Clone ID: LIB3180-050-P2-M1-B5
ttttgttcttggaagcctgctgctgctactggtttctagtacctgcccacctgggcttgcatatgttgcttccctgctgctggcctgcgaatccacctgcatttgttgaggcttatcgccgcgtgtactcctgctttgtgggaggattcaggaaatgcttggagtttcattcggtggatgaaatttttaggtgggtatgtgtgtgtaagtttaacttgatctttatttgaaa

SEQ ID NO: 29725 - DNA, 288 bp, Zea mays
  Clone ID: LIB3180-050-P2-M1-B6
caggaaaatttttttatatattttttttaaatatattttattaacagttttttttttttttttttagttttatatttttttatgtgtttgttttttttttttggaattgtgtaatttttttttataaattttattaaagtttttatataattattttttttatattttattttatattttttgttttattattttcttttttgtttaataatttttattattatatttaattatattttttgtttttatattatatatttttaatttatttttttttattattttttt

SEQ ID NO: 29726 - DNA, 66 bp, Zea mays
  Clone ID: LIB3180-050-P2-M1-B7
ttgttttgtttttagcgcaatacactaggactctccgtttggtgtcgggctgtgacacccaacaaa

SEQ ID NO: 29727 - DNA, 127 bp, Zea mays
  Clone ID: LIB3180-050-P2-M1-C1
gtggtgtggaccggaaggacttgaactcatatggtagccgtcggggtaatgatgaaataatggcaaggggaacgtcagcaaacaataagatcgcgaacaagactatttacggagaagtaggacccaa

SEQ ID NO: 29728 - DNA, 67 bp, Zea mays
  Clone ID: LIB3180-050-P2-M1-C2
ttgtttctgttcgagggggagctggacaacctgggtcttattatccagtaggaggggcttccaaact

SEQ ID NO: 29729 - DNA, 186 bp, Zea mays
  Clone ID: LIB3180-050-P2-M1-C8
tttttattagaacccgacccacaagcacgcgcgacgcgagccaaggaagacgagagcgaggtggagagagagagagagaggaaaaccctgacccgaccaggcagccgaagaagacgcaaacggaggaggccacagagacggcacgcgagggagcccaggcaaaaaaaaaaccacgccgaaccaaat

SEQ ID NO: 29730 - DNA, 85 bp, Zea mays
  Clone ID: LIB3180-050-P2-M1-D11
ctcaagagcatgacgggccggctcggcggatgttttagcatggtcaacgcctccaactatcccggcaagttcggcaattatctaa

SEQ ID NO: 29731 - DNA, 216 bp, Zea mays
  Clone ID: LIB3180-050-P2-M1-D2
ttgcgtacgcgtgggtcaaagaggaggagagaaactattattttgcaaggaggagggaagaatattaaaaaattgacaaagacgaagaaatgcaaaattggaaaaaaagaaaaaatgcaaaaaaaagaagagaaaaaaaatataaaatatgaaaataaaaaaaacaaataaaaaaaattaaaaaaattaaaataaattaaaaaaaataaaaaaata

SEQ ID NO: 29732 - DNA, 231 bp, Zea mays
  Clone ID: LIB3180-050-P2-M1-D3
gctgctctccgaccccgagctccgtatgccgcagcatcaggcgaggcccccctcgcgtgtgaccgagatggcgctgccgaatcaggggaccgttgattaccccagcttcaagctcgtcatcgtcggcgatggtggaactggtaaaactacatttgtgaagaggcatctcactggagagtttgtgaagaaatatgaaccaaccattggtgtggaagttcatccgttggattt

SEQ ID NO: 29733 - DNA, 146 bp, Zea mays
  Clone ID: LIB3180-050-P2-M1-D4
acaatagggaaagcaggcacgccagcaggaaccggaccggaaaacccggaacgacccacgcgattttagacacgagggcgcaaaaaacccaaagggccgacacaccacacaaaggggacacaccacaaacaagcacgcggagaaac

SEQ ID NO: 29734 - DNA, 270 bp, Zea mays
  unsure at all n locations
  Clone ID: LIB3180-050-P2-M1-D5
tagggaaagcnggcacgccagcaggaaccggaccgganaacccgggacgacccactttatttgtagcaacatacaaagagaagcacacgagcaacatcatagcaccaaggggagccaacataaaagcccacctagccctacaagatatacaaaaaagcgcagataccccgacgtccacgacacaatgcccacaacacaacctcacaaaagcgacagccgagggaaaacaaaacacaactaaaacaagccaacaaggcaaaagaggccaaa

SEQ ID NO: 29735 - DNA, 207 bp, Zea mays
  Clone ID: LIB3180-050-P2-M1-D7
atcgttctatacgacaacaacaaaccaaaaagagggaaccaccaaggaggggagggggggcgaacgcagcagggacagacaaagcaaaggggaagaacggcaaaaagagaagcagcagaaagagggagacaacgataggagcagaaaaactgacaaaacgagaacaaaagggaggggagcaaaaagggagccccaagcgtaagacca

SEQ ID NO: 29736 - DNA, 195 bp, Zea mays
  Clone ID: LIB3180-050-P2-M1-D8
ttcttttttgcattacccggcggcggaagcgtaagctcattaacgaagcaagcggccgtcatggtgaagggactcacggtacagtgcgttaggctctacgtacgtgggcaccattcttggatacaagaggtccaagtcgaaccagtacgagaccacgtttctcgagcatatcgagggtgtgaacacctaggaggt

SEQ ID NO: 29737 - DNA, 141 bp, Zea mays
  Clone ID: LIB3180-050-P2-M1-E10
tttaatggttcacaacagctgcagcaacacgtgcgaccttttatcaaccaaggggcggtttcaaacctttcttcctactcttctcaacaacatattttaatcattcaaccaactgtatacacttaacccttctacttattt

SEQ ID NO: 29738 - DNA, 169 bp, Zea mays
  Clone ID: LIB3180-050-P2-M1-E11
tgcggtcgatctggacggccgactcgtttctgtgagctaccgttcttagatccagccgtgaggtagattctccacatccagggcggccagtgcggaaaccagatcggatctaagttctgtgaggacgtttgttttttgtgtggatttttgtcccaagtagaattgtttg

SEQ ID NO: 29739 - DNA, 346 bp, Zea mays
  Clone ID: LIB3180-050-P2-M1-E12
ttttctctgcgcttcctcctccagatcccggcgccccggccccatggccgccctcgtttctagctccagcttctccgcccgccgtccctccgctctctagctccggatcgcacgcgcacgtaaagacatggagcccgcagccgaggacgccgcagccgctgcgccggactcgtgggagacggccgacatagacgggcccatgagtcggctcatcctctccgcgcgacgcgtgtcctcttcgccggacttcgctgacgaccaggacccgtcccagccgccgcccacacttgagccgcagggcgcgccttcggcttcccttagatgcgcgcgaggatgtggttgccca

SEQ ID NO: 29740 - DNA, 321 bp, Zea mays
  Clone ID: LIB3180-050-P2-M1-E2
tctctacttgccctctccctgccaggcttgccggaaccctagcctcatcgcccctcccctcccggcccgatctccctatcgccggattcgtgctgcgggatggactccgacgtggagatgaacgccgccagcgacgaggaggtgatggacgatgaggattactacgactactgctacagcgacgtgggtgacgacggcgacggcgggagcgaggaggagctgttgcccgtggactacgacgagggccttgaggccgagggtaccgacgaggtgttgtccataccctagcagacatttttggttctatatgaaaaattttat

SEQ ID NO: 29741 - DNA, 83 bp, Zea mays
  Clone ID: LIB3180-050-P2-M1-E3
tgtgtctgctagttctagatcgcgagcggccgcccgtttatttttatagcggcgcgggggccgttcccaaccccctaaaaacg

SEQ ID NO: 29742 - DNA, 381 bp, Zea mays
  Clone ID: LIB3180-050-P2-M1-E4
tctcgtcggccggcgagcctcttcctcttcctccggtcgctccccttcccatctccatcttgatttcgattctctggtggctgggaaagcctgcgagagcgcgataaccggaaagatctgagctgctgcaaccgatctccggcgccatggggttcctcgaggacttccaagccagtgttgaagcattgccatctatgctgcatcggaactattcattaatgcgagagttggataaaagtttgcatggtgtgcaactagaaaatgagcagcgctgtcaacaagaaatagaggacattaagcatggacttgaatctggaagtattacatatgacccagcaaaattgaaattttccgaagaagcaatggaggagcagaaacatt

SEQ ID NO: 29743 - DNA, 328 bp, Zea mays
  Clone ID: LIB3180-050-P2-M1-E5
tttgtgtatagtagtttatgatggaaaggggctgttcagtgctgctcgtgtttggtggatgttccgtgtatttggacatgataaagtttgggtgttggatggaggtttgccccaatggcgcgcttctgggtatgatgtttaatcaagttcctatagtgatgccattttaaatgtcattgcttctgttgaagctatttataaagtttactttggtctattgtttggttttaccacttttgtagctttattttatttttattttttttgtatgtttgatcatttcaatttgtttatcattttctatttttataattttttattttttttt

SEQ ID NO: 29744 - DNA, 401 bp, Zea mays
  unsure at all n locations
  Clone ID: LIB3180-050-P2-M1-E7
tttcctcgatccgatccgccgagtgcacaccacctttccccactccgatcgaatcgatggccgccgagggcgagaagaagatgataaccctcaaaagctccgatggcgaggagttcgaggtggaagaggcggtggcgatggagtcgcagaccatccgccacatgatcgaggatgactgcgccgacaacggcatccctcttcctaacgttaactccaagatcctatccaaggtaatcgagtactgcaacaagcacgtacatgccgtcgtcgacgccggcgccgacttgaaggccggttccgacgacgtgggtgccgtcttcgncaacagcacctgcgtcttcggtgaggacctcaagaactgggatgcggactttcgtcaaggtcgaccagtccacgctttt

SEQ ID NO: 29745 - DNA, 347 bp, Zea mays
  Clone ID: LIB3180-050-P2-M1-E8
tttctacttgccctctccctgccaggcttgccggaaccctagcctcatcgcccctcccctcccggcccgatctccctatcgccggattcgtgctgcgggatggactccgacgtggagatgaacgccgccagcgacgaggaggtgatggacgatgaggattactacgactactgctacagcgacgtgggtgacgacggcgacggcgggagcgaggaggagctggtgcccgtggactacgacgagggccttgaggccgagggtaccgacgaggtggtgtcctgacgcgagcagacatttgtggatttataatgtaggaagttatattctgagcgtttaagagtgaaata

SEQ ID NO: 29746 - DNA, 129 bp, Zea mays
  Clone ID: LIB3180-050-P2-M1-E9
tctgtgtgcacggcacggccacagctgactgactcatcctgcgttgtccgataatcatggctagagctccgctgctcctcgcgctgctgtgcgcgtgcgccgccgccgacggctccaacaatgcggcgg

SEQ ID NO: 29747 - DNA, 356 bp, Zea mays
  Clone ID: LIB3180-050-P2-M1-F1
tgtctgctgccaaaaagctagttccttctgttgcacactctaaaaagagtgaaactgatgatgagggtgccagtaatggacatgctaagaggcacaaaaagaaaggacctgtgaaagaggataactctaagagtggtagtgacctcagatcaccaatctgctgcatccttgggcacgtcgatactggaaagacaaagctactagattgtattaggcgcactaatgtccaagaaggcgaagctgggggtattacccaacagatcggagcaacatacttccctactgaaaacattagagagagaactagggagttgaaagctgatgctacactcaaggttccaggcctgcttgttatt

SEQ ID NO: 29748 - DNA, 311 bp, Zea mays
  Clone ID: LIB3180-050-P2-M1-F11
tctaggagtacaagtctgacattaacattgtctccaatgctagctgcacaaccaactgccttgctcctcttgctaaggtcatcaatgacaagttcggtatcgttgagggtctgatgaccactgtccatgccatcactgctacccagaagactgttgatgggccctcgtctaaggactggaggggtggaagggctgctagtttcaacatcattcccagcagcactggagctgctaaggctgttggcaaagtgctttctgtccttaacggaaagttgactggaatgtctttccgtgttccaaccgtcgatgtt

SEQ ID NO: 29749 - DNA, 202 bp, Zea mays
  Clone ID: LIB3180-050-P2-M1-F3
ttttctgtatcttacgacactcaacctctcaggatgaccttttaagaagaccagggaggtcattacctaacctccaagaatccttcagaagcgtcattatgtctcacctttagctaattaaaacaattttttgtgtttacataaacaaatagtctaagtatctatcatacatgctagccttcacaaacacttactttttcca

SEQ ID NO: 29750 - DNA, 145 bp, Zea mays
  Clone ID: LIB3180-050-P2-M1-F4
tggttgttccgcccattcgccctctgccctgggcccattcttcgacgacgggcatgcgccctgcgccctcgccccacccggcgacgacctcgttttctacgtgcgcgggcctcggctagctcctgattggcgctgggtagcgggc

SEQ ID NO: 29751 - DNA, 147 bp, Zea mays
  Clone ID: LIB3180-050-P2-M1-F5
tgctttctgcagggcccctgatctcgcgcgtggtgcaaagatgttgggacatcttcttatatatgctgtttcgtttatgtgatatggacaagtatgtgtagctgcttgcttgtgctagtgcaatgtagaggacgtggctgctaccca

SEQ ID NO: 29752 - DNA, 186 bp, Zea mays
  Clone ID: LIB3180-050-P2-M1-F8
tttgtggttttgatctctgcaactcttcctcatgagatcttggagatgactagtaagttcatgaccgaaccggttaggatccttgtgaagcgtgatgagctgaccctggagggcatcaaacaattctttgttgctgttgagaaagaggagtggaagtttgatacactctgtgatctttatgattca

SEQ ID NO: 29753 - DNA, 377 bp, Zea mays
  Clone ID: LIB3180-050-P2-M1-F9
tctgtaagagcttatgatgctgaagcgcgcaggattcgtggcaagaaggccaaggttaactttcctgatgcaccagaaagttggtcagaagcgccgttctggctcagcttccgctaaagcatccaagtcaagttttggacagaagcctattgtcaaagtaactatgaacagccttgccaacacaaatgcatccttcttccaatctgttagctacccctccaattcatttgttcagcatggcaatataccatttgttccagcaatgaactctactggttctgttgaggatcctatcatgaatctgcactctgaccagggaagtaactcctttggctgctcagacttgggctgggagaatgataccaagacaccagaca

SEQ ID NO: 29754 - DNA, 405 bp, Zea mays
  Clone ID: LIB3180-050-P2-M1-G1
cccgccccattttttttgagcttatcctgctgaagcgcgcaggattcgtggcaagaaggccaaggttaactttcctgatgcaccagaagttgggtcagaagcgccgttctggctcagcttccgctaaagcatccaagtcaagttttggacagaagcctattgtcaaagtaactatgaacagccttgccaacacaaatgcatccttcttccaatctgttagctacccctccaattcatttgttcagcatggcaatataccatttgttccagcaatgaactctactggttctgttgaggatcctatcatgaatctgcactctgaccagggaagtaactcctttggctgctcagacttgggctgggagaatgataccaagacaccagacatcactttcattgctccca

SEQ ID NO: 29755 - DNA, 118 bp, Zea mays
  unsure at all n locations
  Clone ID: LIB3180-050-P2-M1-G10
ttttnctgctctgttccacgcctccgtcaccgtcgggtcggttcgatcctaccgagggcacacttataagtttgttccattgcatacaacacaggagcattatgatggctttatttta

SEQ ID NO: 29756 - DNA, 356 bp, Zea mays
  Clone ID: LIB3180-050-P2-M1-G11
tctatccaattaagctgttctacacttcaaacatgcccatcattcttcactctgcgctgattaccaacctctattttatatcccagcttctctacaggaagtacagtggaaacttccttgttaaccttcttgggaagtggaaggagtctgaatactctggccattctattcctgttggtggtcttgcttactatgtaactgccccatcaagtttggctgatgtccttgcaaatccattccatgcactgttttatgtggtcttcatgctgtcagcctgtgctctgttctcaaagacatggattgaagtttctggttcatcagcaaaggatggtgctaagcagctcaaggaacaacaa

SEQ ID NO: 29757 - DNA, 406 bp, Zea mays
  Clone ID: LIB3180-050-P2-M1-G12
tcgatttccccttaacacaacacagaggaagcaggcggcggcgatcgggcgatggcatggcgggcgagcctgtctcggagcctaaaggagatccgcgtcctcttctgtcagtcctccccggccagcgccgccgcccgtgagttcgtgaagaagaactatggtgacatcaaggctcgcaacccctccctccccttccttgtccgcgagtgctccggtgtccagccccagctctgggcgcgctacgatatgggtgtggagagatgcgtgaacttggatggcctgaccgaagcacagattgataaaaagctggaggagcttgccaaggccggcgagtcttttaaaaccaaatagttttggaactctattctaccatgtttaacctttcccaaataaatgatgccatatg

SEQ ID NO: 29758 - DNA, 342 bp, Zea mays
  Clone ID: LIB3180-050-P2-M1-G3
gagcggcgccgcaggaccgaccggaaaccgggcgaccagcgccgacggaagaccgcgcactccagaaagcagaaagagacaaaccaggcgagggagcaagacgggaaaaccccaacgagcggggagaagcgaccggaacgaaagaagagaagaaagaagcaagcgagaggggacaggaggaacgggcacaaaaccaccccaagaaaaaaaaagagagccggaacaccgaagaagcagaccaaaccgcaccgaggaagaagaaaaaaagaagcaaagccgaaaagaaggaagccaaaaaaagaggaaggaaaagaaccaggaggacggcagaaaaacaggaag

SEQ ID NO: 29759 - DNA, 366 bp, Zea mays
  Clone ID: LIB3180-050-P2-M1-G4
tttcctactatgttgtgggttggtgagcgcactcgacaactcgatggagctcatgttgaattcctccgtggtgttgccaaccctctgggcataaaggtgagcgacaaaatgaaccccagtgagttggtgaagctgattgatattctgaacccttcaaacaaacctggaaggatcaccataattacaaggatgggggcagagaacatgagggtgaagttgcctcatctcatccgtgctgctcgcaatgctggactgattgtcacatggattactgatcctatgcatggaaacaccatcaaggccccttgtggcctgaagactcgttcatttgactccattctggctgaagagctgtccttttttgat

SEQ ID NO: 29760 - DNA, 126 bp, Zea mays
  Clone ID: LIB3180-050-P2-M1-G7
tgctttcggccgcccttttttttttttttgggatattttataaaaatacgggggaacccaaaatctaatcccatgaatactatttaaaactcttatctcttttattatttcagtctaaaaatttaa

SEQ ID NO: 29761 - DNA, 169 bp, Zea mays
  unsure at all n locations
  Clone ID: LIB3180-050-P2-M1-H11
ttcnctgacaattgccacaggtgatgatgaaggctgcattaaggtatgggatacccgggagcgatcttgctgcaacagttttgaagtccacgatgattacatttcagatatgacctatgtggctgagacaaatcagatactggccacaagtggggatggaacttttttt

SEQ ID NO: 29762 - DNA, 284 bp, Zea mays
  Clone ID: LIB3180-050-P2-M1-H2
tgttttttgccaacttccttcactttttgggcgatgttttgaatgcattcgggtccgtcgccccaagaccaaattaccttccccattaacgtgaaccctaaccccgagccccttgccccctccttttagttgtcatcgccgtccgattttccgggcccccataagctctactcttccacgagtggtacaagcatggtggtcgtgggcttcgcatacttcttcaacagcatatttttcaaggtgcacgatgaaaagctaccagcagatttttactacacggcgga

SEQ ID NO: 29763 - DNA, 229 bp, Zea mays
  Clone ID: LIB3180-050-P2-M1-H3
tgtccacgcgtccgcccacgcgtccggatgcccatcatcggcctcgccctcaccggagcaccgaactggtactccttgctcgcgggggaaaagttctcatctttctccccgagctcaccttggcattcccgacggtctgggtcgccacagccaacttcttcactagctggccgacctccaccccttccttcgccttttccagcgtgaggcgcacgaagttgtcaagggt

SEQ ID NO: 29764 - DNA, 123 bp, Zea mays
  Clone ID: LIB3180-050-P2-M1-H5
ttgctttccttttttttttttttaggctttttaaccaaaccgtttgttttattcgtgacgttctacgagaaccggcgcagcgccgtgcgggcaaggacggatgatgtttatttacagtcatgc

SEQ ID NO: 29765 - DNA, 143 bp, Zea mays
  Clone ID: LIB3180-050-P2-M1-H6
tttttctagaccgcgagcgagcggaacgggggattaaagaaagggagaccgggcccccaaactgccccaacagataaaaaaggcccgacaataacacaaaaaaaaaaatccacgaggcgcggacaaaacagaaacagaccaaa

SEQ ID NO: 29766 - DNA, 371 bp, Zea mays
  Clone ID: LIB3180-050-P2-M1-H7
ttgtctgctgccgtctccctcgcctctttcccctcgtctcgtctgcatccggctccggcgccccaagacctcatcacctccccttcgccgtgaaccctaaccccgcgcccctcgccccctccttctcgtcgtcatcgccgcccgcttttccgggcccccatcgcctcttctcttccacgagtggttcaagcatggtggtcgtgggctccgcggactccttcaacagcattttttccaaggtgcatgatgaaaagcttccagctgtcttttactacacggcggtgtggtgtggaccatgtatggcgaccgcacctttagtatcaaagctgtacagtcagttttccaagtcaccttgtttacaaagttgacat

SEQ ID NO: 29767 - DNA, 212 bp, Zea mays
  Clone ID: LIB3180-050-P2-M1-H9
cttacccgccgcagccaaaccctccccagcagccgtcgtcgccaccggtgcagcgcggaggcgaccccccatcggcggcaagatgcagatctttgtgaagaccctgacggggaaaaccatcacgttggaggtggggtccttggacaccattgacaacgtgaaggccaagatacaggacatggagggtatcctgccgggccagcagcggctta

SEQ ID NO: 29768 - DNA, 443 bp, Zea mays
  unsure at all n locations
  Clone ID: LIB3180-051-P2-M1-A1
tcgcatccatccttgctttctccgttccggagcatctcaaccccatggacatgatcaagatcgggatcaatgggttcgtcaggatcggaaggctggtggccagggtggccctgcagagtgacgatgtcgagctcgtcgccgtgaacgacactcttatcagcaccgactacatgacctacatgttcaagttcgacactgtgcacggacagtggtagcaccatgatgtcaaggtgaaggtctccaaaacccttttctttggtgagaaggaggttgctttgtttggttgtaggtacctttttgagattcctttttttaatttgtttatttaattagtttttttattttatttgttttatgctttttttttttattggattgattatttatttatatttattttnggattttccccccccccccccccccccttcttttcccccccc

SEQ ID NO: 29769 - DNA, 161 bp, Zea mays
  Clone ID: LIB3180-051-P2-M1-A10
agggatgcgacgcacagcgcgaagcattaacgcctttgcccgttacccgaatatttgtttgaccaccgtcgatccgtctcgggaggtctccatgatacagtgcagggacgctccatcctactggctgtcccttatttatttaattccttacatctagcatt

SEQ ID NO: 29770 - DNA, 267 bp, Zea mays
  Clone ID: LIB3180-051-P2-M1-A11
tgcctcgctaaaatatcacagaccctcaaaaggggggacctttctatagaacctgggtgcctccacttccagtccatgcacaatcattcttcagtctccatagattgctaagaactagcccctatacttagataactaattctatcctatcctcccctttcctcactccgccattaggagcattgtcattttgcatatatgatcatctgctaatataccatcaattcattaaaaaaatacacgcttaaatttattggtattttcaag

SEQ ID NO: 29771 - DNA, 370 bp, Zea mays
  Clone ID: LIB3180-051-P2-M1-A12
ctcccatgggtggcttcccccactatggtatcgtgaagggtgactacctgatgatcaagggatgctgtgtgggtccaaagaagagggtggtgaccctccgccagtccctcctgaagcagacttcccggctggcgctggaggagatcaagctcaagttcatcgacacatcgtccaaatttgggcacggtcgcttccagactaccgatgagaagcagaggttctttggtaagctcaaggcgtaaggtgctgcggtgcagcgaaagtcccatttggcaaaatcatcaaactgggaaacctttgctatgtaccttgctgtaccaagttttgttacaggataatttgtgagcattgttccggtcttcattggatt

SEQ ID NO: 29772 - DNA, 387 bp, Zea mays
  unsure at all n locations
  Clone ID: LIB3180-051-P2-M1-A2
tcgtttcaggtccacagaatcacgaaagttaacagggacgaagttctctcgaaggcagaaaatgatcttgctgcagttgttaatcaatacattgcaaaactagtaaaagaattacaaggaactgacttctggaaactcagaagagcctacacctttggtgtacaagaatatgtggaaacttctacacttttgtaattttgcaagtatgtgtctttattaaagcttgcaaaaattaatgattctttaatagcactttattggttatattntctntcttttttaatttaatagtttttttaattattttttatatagatttttttgatacttttttttgtttaatttatttatattcttttcatttaattgattttttttttaatattt

SEQ ID NO: 29773 - DNA, 142 bp, Zea mays
  Clone ID: LIB3180-051-P2-M1-A3
gttcaggcaaccaaaaagcaagttgccccgccgcgcacaggaagaagagagcagaggaggatggctcgtacgaagcagaccgcccgcaagtccacgggaggcaaggccccccgcatagcagctcgccaccaaagcggctagg

SEQ ID NO: 29774 - DNA, 341 bp, Zea mays
  Clone ID: LIB3180-051-P2-M1-A6
tctttattccttccccgtcactgcacatcgcgtgcgcggaaacagccagagacacactccaactcacttgaccaatcttggccctgggccccggccgcgtcttcggaaaacctgaacaccatggcagggctcaaaaagctcgccgagtacctcaccactgggagctacatgactatctaccaagctctcaaggatgacttggttagctacacttcctttatagtctgcttccttgtacaagtatattaacgtatcataggtggattaatcacattgatgcgcttgtgaggcttgatcgagattactgtatagggtcaatagagtgaaggttgaatccttaa

SEQ ID NO: 29775 - DNA, 118 bp, Zea mays
  Clone ID: LIB3180-051-P2-M1-A7
tctttctcgcaaggactctcttctgagaagagtgggacggatcgagctcgaccccacagaggtccgttctgacccttctatccggcatagaaaggagacgaacgctctttgttataat

SEQ ID NO: 29776 - DNA, 184 bp, Zea mays
  Clone ID: LIB3180-051-P2-M1-A8
ggcggcggcaccggcaggcggcggccctcgggcattgtcccagcgggagcaggacatccagatgatgctcgccgccgatgttcacctcggcaccaagaactgcgacttccaggtggagcgctacgtgtacaagcgccgcactgatggtatctacattattaaccttggaaagacctgggacaag

SEQ ID NO: 29777 - DNA, 115 bp, Zea mays
  Clone ID: LIB3180-051-P2-M1-B1
tcgctcttccgtagtcttctgcggttctgccgtctacgccttcaatttggcctctctcccttgcaagtttaaagcttacctttaaccatgggtaaggagaaggcccacattaaca

SEQ ID NO: 29778 - DNA, 414 bp, Zea mays
  Clone ID: LIB3180-051-P2-M1-B10
tctcttacagccgccgccgccgccgccgcatcccagcctccatcaccgtttccgtctcgctgccatgggtaaggtgcacggatcgttggcgcgcgccgggaaggtccgcgggcagacccccaaggtggcgaagcaggacaagaagaagaagccccgcggccgcgcgcacaagaggatgcagtacaaccgccgcttcgtcaccgccgtcgtcggcttcggcaagaaacgcgggcccaactcctccgagaagtaggcgccgctcggctcgtaccggttcctcatccttcccgctctccgtatgcttatgctcttgatggtactagtttcgttgttcgcatgcagaggtagaaccttctgtagtttcggtttggtggccatgtgcttatattgtaacttgtgatggtttgaatttga

SEQ ID NO: 29779 - DNA, 165 bp, Zea mays
  Clone ID: LIB3180-051-P2-M1-B11
tcgaaagagagggacagagagagagagggagtgccaggccagctgtggggtgtgtgtgtgcctgtgtgggggaactgctggggatggagagcgagatggcggacgcgcccgccgcggcgatccccgccgccgtcgaaccgctcgcggcggtggcggaggaagggg

SEQ ID NO: 29780 - DNA, 278 bp, Zea mays
  unsure at all n locations
  Clone ID: LIB3180-051-P2-M1-B12
accttagctccacaatcattgcgtcgcaagattcgaattaattggtcctgggcgatttctttgggggtctgatgaccactgtccatgccatcactgctacccagaagactgttgatgggccctcgtctaaggactggaggggtggaagggctgctagtttcaacatcattcccagcagcactggagctgctaaggctgttggcnnagtgcttcctgtccttaacggaaagttgactggaatgtgctttcgggtccccaccagttattgttttgttggt

SEQ ID NO: 29781 - DNA, 118 bp, Zea mays
  Clone ID: LIB3180-051-P2-M1-B3
attttgagcattcagaaacacaccaagcgaagcacattatcaacaacctaacaacaatggctaccaagatattatccctccttgcgcttcttgcgctttttgcgagcgcaacaaatgc

SEQ ID NO: 29782 - DNA, 144 bp, Zea mays
  Clone ID: LIB3180-051-P2-M1-B4
cgagcggggaaagtcggtggaatcaccgtatttgtaggattgacatttgcaagcataacattatttacttaacttgaacccggatttgagcaacaaatttttcttccacaaaaattccaattacaggaatattttgatgaccct

SEQ ID NO: 29783 - DNA, 230 bp, Zea mays
  unsure at all n locations
  Clone ID: LIB3180-051-P2-M1-B5
cgccgtccgaagctgggaaccccaatctaatcgacacgtcgccgagatgggccgcaagttcttcgtcggtggcaactggaaatgcaatggaaccacagatcaggtcgagaagattgtcaaaaccctgaatgaaggacaggttcccccttcagatgttgtggaggtcgttgtcagccctncttatgtcttccttccttgggtcaagagccagctgcgccaagagttccatg

SEQ ID NO: 29784 - DNA, 259 bp, Zea mays
  Clone ID: LIB3180-051-P2-M1-B7
tctcggacccgcaaaaagagctccgtcagttcctctacctcctctgtaggagcacacttgtttcggaaaggaacgcagattcacgccacgccgccggcttaattatatggcgccggcgttctcggcacaagttcccgcgctccgacgggcaacactgcgcgtgcggtgggtcacggctgggcttgtctcatcggggattctcggcggcaacaagccgattctggtgcgtgacttcgtgaggtcagcgttgtacgacccc

SEQ ID NO: 29785 - DNA, 240 bp, Zea mays
  Clone ID: LIB3180-051-P2-M1-B8
tgttctccgacttccgcctcggattgaagcaatgtcgtcggacgacgaggtcagggaggagatggagctcgacctctcctccatcgatgtcgtcaccaagttcaagactgtcgccgtaatcctgtacaacgctctgaagctgtttgtgtctgaatgcatgccaaaagcaaagattgttgacctttcgtagaagggtgactctttcataagagagcaaactgttaatgtctacaagaatgc

SEQ ID NO: 29786 - DNA, 167 bp, Zea mays
  Clone ID: LIB3180-051-P2-M1-B9
ggcggcggtggcggtggcctgctgggcggctgcggtggcggcgtgggcgtacgcggtgtcccggccccggcccgtgtacctggtggacctgtccgggtacgtggcgggcgcgttgcacgaggcgttccgcgccaagacgatcgcccactttgggcggtgcgggcggt

SEQ ID NO: 29787 - DNA, 149 bp, Zea mays
  Clone ID: LIB3180-051-P2-M1-C1
tcttatcgtcatcctcgctcgctcctcatagccagcgccttctcctcctcctgcttgtttcccaccgctgccgacatggctgcgcaagaggagaaaaccgctgttgcttgtgctgccgccgatgtcgcgacagaggagcctgcgccggc

SEQ ID NO: 29788 - DNA, 420 bp, Zea mays
  Clone ID: LIB3180-051-P2-M1-C10
ttttcggctgcccctacggctggacttccatctcaagctactgcaaatcaacaaggaaccagtggtattcaaggagcagcttcttctactgacagtaaattcagtggcaggaaagaacttccagcggatatctttactgcactatatccaccatcaactccaatgatgcctggttggcagagagccccccattttggaatgggatacgccatgcaatatccacctggagtgttccagggaatgcatgcatatccttagcctacatatcaacaacctgtatattcgcaacatgcatatttccacccccaacctgtgaaagcttcaaacccttttgatcttgggaatgggccaactccaactcaagctcacatgcccccatctggaccaccaggagtattagcaggcccagcttcccaaacc

SEQ ID NO: 29789 - DNA, 395 bp, Zea mays
  unsure at all n locations
  Clone ID: LIB3180-051-P2-M1-C11
agagatgacccaccacatcccatcccggggactctctcctcctgcgctggggtccctccagtcccagatcccgattcgccgacgcctccggcagatctagccagcagctcccgtctcagaactgccgcggtcgccatggagaagccatgctctctcctggtccacttcgacaagggctcggcatcgatggctaacgagatcaaggcggatctgcaggccatnnatttcccngccaaggtcgacaccttttctccgtctatttcgcttctgcttaacggcttgacgtttcctaannttcttcttaccagtcgtccgcttctggctctcctttctttttccttaattttctctaagcttgctctcgtttatgttgtggtcttagtctgtgggggttt

SEQ ID NO: 29790 - DNA, 393 bp, Zea mays
  Clone ID: LIB3180-051-P2-M1-C12
tgccatggcatggaaacctgtcgtgaagaaattgggtttgtggaaaactgttcgtgccctagctcgcctctatgatgctggaatggggatggtcattttcatacccatagccatttgctcgtggtttccattcatatccactttccagacgcgacttctgttcaaccaggcgttcagcagaggtttggagatatctctgatccttgctggcaacaatccaaatgctgggatctgatggtggcagttccggccttgcttcattaatctgtggacctttcgtacttgaattaatcctcacttctcagttaacagtagcgatgtacatatctgatatctctatgttcaccggagttgtttgccgtgtttataatatcaacggctatatttctagag

SEQ ID NO: 29791 - DNA, 114 bp, Zea mays
  Clone ID: LIB3180-051-P2-M1-C2
tttctttatcgtcatcctcgctagcttctaatagccagagcctcttgctcctggggcggctttcccaccgctgtctacattgactgcgcaagaggtgtagacctctgttgctgc

SEQ ID NO: 29792 - DNA, 144 bp, Zea mays
  Clone ID: LIB3180-051-P2-M1-C3
tcggctggtaccctaataataattctgctggctgcggcgatccccaaataaaagaggcagggtgcgatgcatcgcggtcttctcgactctcgagtggtgtttgcgttagacagccagccactgtgtggctagtgtttcaacatt

SEQ ID NO: 29793 - DNA, 129 bp, Zea mays
  Clone ID: LIB3180-051-P2-M1-C8
ttttcggagcagtagcagacacctccgccacctgcaccctcgaatcgttccggagcgatggcgtcgcagggatcctccgtcttcgccgcactcgagcaggccccggaggaccccatcctcgtagtgacc

SEQ ID NO: 29794 - DNA, 219 bp, Zea mays
  Clone ID: LIB3180-051-P2-M1-C9
ctcgcagacatctcacatgatggacatgtgcgtcctactccattgtaagaccatgagctgctgccatatgtaccgagtgtgaaagcccgctaaggactcgcatgctgctgagaatcagctgagccaccaactggaaattcgattcggtggatttcgctgcgccgggttgacggagcggatccagtacatggactctcacgttgtgcttgtgggccacct

SEQ ID NO: 29795 - DNA, 378 bp, Zea mays
  Clone ID: LIB3180-051-P2-M1-D10
tagcaaagcacgcaatccaatttccctccatttctctagatctcgagttgctctgctacttcttttagattccttctttcgttcgggagagcgattctctagctggtggcaatggcgaagggcgagggtccggcgatcgggatcgatctcggcaccacctactcgtgcgtcggcgtgtggcagcacgaccgggtggagatcatcgccaacgaccagggcaaccgcaccacgccgtcctatgtcgccttcaccgacaccgagcggctcatcggtgacgccgccaagaaccaggtggccatgaaccccaccaacaccgtcttcgatgccaagcggttgatcggcaggaggttctctgacccgtcagtgcagagtgacatg

SEQ ID NO: 29796 - DNA, 117 bp, Zea mays
  Clone ID: LIB3180-051-P2-M1-D11
tcgagcgtgccggcggttcaacctaataccctgccctttctggggttccttccggttcaacttcactcggttcggcttaaacgaacccaacttccttccctaaccgttggctttttc

SEQ ID NO: 29797 - DNA, 137 bp, Zea mays
  Clone ID: LIB3180-051-P2-M1-D12
tcggggctcagtcgtcgctgagggacctcgcgaggggcggggcgggcagggagaagaaggctaagaaaatgcggatggaggacgacgggagggggagggacactgggatggtgagggataggcggggatctggtgga

SEQ ID NO: 29798 - DNA, 114 bp, Zea mays
  Clone ID: LIB3180-051-P2-M1-D5
attaaaaagcctgtgttgtcggaaacaccaaaagagggaggttgggcattttcctcttatttctttttgggatcgggggagtgggccacccgtggttattttagttggccagct

SEQ ID NO: 29799 - DNA, 125 bp, Zea mays
  unsure at all n locations
  Clone ID: LIB3180-051-P2-M1-D7
tcggttcgacctcatgtacgccaagcgcgcgttcgtgcactggtacgtcggcgagggcatggaggagggggagttctnctaggcacgcgaggacctggccgncctggagaaggactacgaggagg

SEQ ID NO: 29800 - DNA, 367 bp, Zea mays
  Clone ID: LIB3180-051-P2-M1-D9
gtggattaccattcacaccaagcgcagatcatgagctactagctaactacaacgggtaccaagattttatgcctacttgcgcttgttgcgctttgagctgatgcaacaaaggtcgctatatattgcacaatggtcagtggctccaagctgatgatgacacaactggctccaccagatagtgcattgggagcatgaacacccagatacgcaaggctatcgctacaactagcaattagctgcagcgtgttacaacaaccaatctccaatgcgcaacaacagtgcttggctcatctgacactacataccatcagaacgcagcaggcacgacatttgctaccagcactgaggcagctagccatggtgaacc

SEQ ID NO: 29801 - DNA, 416 bp, Zea mays
  Clone ID: LIB3180-051-P2-M1-E11
ccaacatggagaagatcatgcaggcgcagaccctgtcggactcgagcaagcaggcgtacatgcgcggcaagagggtgctcgagatcaaccccaggcaccccatcatcaaggagctccgcgacaaggtcgcccaggacaacgagagcgaggagctgaagcacacggcgaggctggtgtaccagacggccctgatggagagcgggttcaacctccccgaccccaaggagttcgcgtccagcatttacaagtcggtgcagaagggcctggacctgaaccccgacgcgaccgtggaggaggacgacgaggcagaggagcagccggaggtggaggagaaggagccggaaccggagccgtcgtcctacgacaaggacgagctttaggctttcggatttgttttcaagtctagctagctcccg

SEQ ID NO: 29802 - DNA, 412 bp, Zea mays
  Clone ID: LIB3180-051-P2-M1-E12
agctcctgttctcgctgctggccgcggaggcggcgctggtgctggcgctgctcttccccacgcccgtgcgccgcctggctctgctcgccatcgatcgcgccaagagggggcgcggacccgtcatggccaagaccatcgcgggcaccatgctcctcgtactagtctctgctttctacagcgtcgctaagatccgccgccgcgagggggagctcggacagctcacgcccaccgaccaggtgctcgccagtcgccacctcctcgaggcgtcgctcatgggatactctctgtttcttggattaattattgaccgattacatcactatattagagagttgagaatgttgaggaaagacatggaggctgtaacagagcagggccggacactagaagcagcaaaatccggaagcactga

SEQ ID NO: 29803 - DNA, 405 bp, Zea mays
  Clone ID: LIB3180-051-P2-M1-E5
aggtagcaagggaatcacatcgccatggcagccaagatgtttgcattgtttgcgctcctagctctttgtgcaaccgccactagtgctacccatatcccagggcacttgtcaccactactgatgccattggcttccatgaacccatggatgcagtactgcatgaagcaacaaggggttgccaacttgctagcgtggccgaccctgatgctgcagcaactgttggccttaccgcttcaaccgtgccagatgccaatgatgatgccaggtatgatgccaccgatgacaatgatgccgatgccgaatatgatgccatcgatgatggtgccgactatgatgtcaccaataacgatagctaggatgatgccacccatgattgatgccaaacatggtttcaccattgttgtt

SEQ ID NO: 29804 - DNA, 125 bp, Zea mays
  Clone ID: LIB3180-051-P2-M1-E6
aagccgtcttttctaaccccaagaccagccagccggccggcgttatttgtcattagattaggcggtttatttacccgacccgttcacaatccaggggctaaaaaatcaaaaaaagcccggcccgg

SEQ ID NO: 29805 - DNA, 136 bp, Zea mays
  unsure at all n locations
  Clone ID: LIB3180-051-P2-M1-E8
tctcggacgcgtgggcttatctcttctgcctgttctctcacctttcacaaaatctctctgtctcacgcctttcccgcgcgccctttttccacgcacgggcggnttcgtcggcggtcgcgcgcgcccgaccgtgccc

SEQ ID NO: 29806 - DNA, 145 bp, Zea mays
  Clone ID: LIB3180-051-P2-M1-E9
tcttcaccaccataccaggagagagaaaagagagaggcgcctccactcgtgactcgtgagtcgtgagtagtgactcgtctggtctcccctttttcgtccgtctggtcctcccgtccagaggcgttcttttttccttccccttttc

SEQ ID NO: 29807 - DNA, 75 bp, Zea mays
  Clone ID: LIB3180-051-P2-M1-F1
caaacaggaagagaagatggcggctgcggcggccgccagcatggtggtggtgcgggaggtcctgggccttgacgt

SEQ ID NO: 29808 - DNA, 65 bp, Zea mays
  Clone ID: LIB3180-051-P2-M1-F11
aaccgtctgtaaagggggggggccagaaggggcccggcccgtttttcggttccctgctggcccaa

SEQ ID NO: 29809 - DNA, 412 bp, Zea mays
  Clone ID: LIB3180-051-P2-M1-F12
gcgtattttgcttcgccaaggtgctgtctggaaagactttccagaaaagattgtcaaattggcccaagctgacttcagggcaaaaaagatgatcacagaaacaggatatcagaaccagctatttttgctggattttgcccatatgacattcatagacacaaagacaggttttcagaggccaattgcttggatcgatgaaaatgaaaagtgctactttccggaatcatttatacaagatcagaagttatttatgaagaaagattttggcaacggaaatcatgagttcattagtgaagagcgaaatgggtcacgagtaacgaatcaccagtttggagcatcagaaaagtctgctgaaagctcaaactttgagtcaagtattggagatgtttctagtgctaagagagctaggtct

SEQ ID NO: 29810 - DNA, 90 bp, Zea mays
  Clone ID: LIB3180-051-P2-M1-F2
catcgacactagtaaaagtttgtgctgggttgggattttttgtgcatcttgtgatacctcaaggcttcatcatttaaatgtttagccgcg

SEQ ID NO: 29811 - DNA, 107 bp, Zea mays
  Clone ID: LIB3180-051-P2-M1-F4
tcgtttattctagttcttcccaatcaatactggggtttcttggcgggcgggtgctttttcccgaacccccctttggttttcgggtcaaaaggaattgggagggcccc

SEQ ID NO: 29812 - DNA, 300 bp, Zea mays
  Clone ID: LIB3180-051-P2-M1-F5
gtcttgcctctatctcatctccttcctcctgttgagcccgccggcctcccacagcttactacgaaaaccctaaccccttcccttatcctctgctccctctccacgtttccacgaacgttggcgcgcaagctcgtggtgtgagcggtcactgtctcccatcccatggctccggcgctgagcgggactctgggcgcgtcgtcggtggcggcgctgcggccctgcgcggggaggagggcgccgttcgccgcgagctcggttgcgccgtgctggagaggggtggtgtggttccctattgttctt

SEQ ID NO: 29813 - DNA, 201 bp, Zea mays
  unsure at all n locations
  Clone ID: LIB3180-051-P2-M1-F6
tccgtcgacacgatcttcgnctgnctcaaggncggcatgtccgtcgcccggttcgatttctcgtggggggacgccgcgtaccaccaggagacgctggagaacctcaagctctccatcaagtccaccaagaaactctgcgctgtcatgctcgacaccgttggcccggagctgcaggtggtgaacaagagcgagaccccgatc

SEQ ID NO: 29814 - DNA, 304 bp, Zea mays
  Clone ID: LIB3180-051-P2-M1-F7
gtttccagtgaaataatgaaagaaatgcaggccaagcctgaccttatcattggcaactacagcgatggcaacctagtcgccactctgctcgcgcacaagttgggagtcactcagtgtaccatcgctcatgccttggagaaaaccaaataccccaactcggacatctacttggacaaattcgacagccagtaccacttctcttggcagttcacagctgaccttattgccatgaaccacaccgatttcatcatcaccagcacattccaagaaatcgcgggaagcaaggacaccgtggggcagtacg

SEQ ID NO: 29815 - DNA, 132 bp, Zea mays
  unsure at all n locations
  Clone ID: LIB3180-051-P2-M1-F8
tnctccttttcgacggctgctcggtaacctgggcgcccctagccagctctaagtgagcgccaccagcagcatctgccaccgactcacgcataccgtggaataaattatggtattggtagagtgtcatctatt

SEQ ID NO: 29816 - DNA, 368 bp, Zea mays
  Clone ID: LIB3180-051-P2-M1-G1
ttctttcagccggtccagctgctctaccgcacggttcgcaccgcgcgcgtactggatccattagccgcgcgcgcgcgcatctgtcgtgatctctctcgcccgagagatcctcctcgtcgggtcctactcctacctcatcagtcctccggtccatctgtcctcctccggcacaaggacgacgatgcaggtcacgccggcggcgaccctgcggccggcggcggcgcacgcgttgcggctgtctacagatcactgcagggaagggccaaagattagggttcggtttcgatcgaggaaactatcgtggacagaaacacttgatgatgccactagtctgacgagagccaccggaaggcaacgcaagcattcct

SEQ ID NO: 29817 - DNA, 417 bp, Zea mays
  Clone ID: LIB3180-051-P2-M1-G10
gagaagaaaacaatagctattctaggagacaggagtattgacagtgaggaccccttggagcatgtaattgacggaacatctagcgaggaggaagtatggatgctactcaaaaccacttgagtttggtgaacaaagatgagaaccagcaaactatggctgacctatttcaagaagtttttaatccaacaaacatggatggtgccatgaaatcaatgacatcaacaggagctggtaactatggaagaatgcaacagattatgcagatggaaaaatattggcatgtggaatttttgagacagtatagcagagagcacagttattcaggtgatttaaagggaactactgttcagattatgtcaaggtcattggaaggaaagctaacagtctgcagctgcatgttccaggaaaagggcaatg

SEQ ID NO: 29818 - DNA, 317 bp, Zea mays
  unsure at all n locations
  Clone ID: LIB3180-051-P2-M1-G12
gttgcncncccgaaccagaacaaccagagagcggancaagaagaagaggcgcggcgccgcaacgggcggcgggagcgncgcancgaggagcggcgagcggagaaagccggcggacaaccccngcagcgagcggaagccgacgggcaacgangggnggagcgccggcccgaggacgcgggcggcggancncgccggccacgagaaggccaacccgcgcggcggcggcggggggcaccnccgcgcgagcccgcgcgacgggcgccagcaagccacggcggcagnggaccccgaagacaccccacgggagaaaggcacaa

SEQ ID NO: 29819 - DNA, 84 bp, Zea mays
  Clone ID: LIB3180-051-P2-M1-G2
agcgttcggtccaggtgtttgtgccgaggaccaaagaggcgctttcctggtacgccccgtacgttcaccgcaatcccgcgggcc

SEQ ID NO: 29820 - DNA, 154 bp, Zea mays
  Clone ID: LIB3180-051-P2-M1-G3
tctttacgcttacgtagaccttctgcattatgcactacaacccgctcgacaacccgagggtcaccctgagggtgctggttgttctggttgttgttctgagtgccaccttcaaggctaccttcaggcattcaagctgtcagtcaccgtggccggc

SEQ ID NO: 29821 - DNA, 80 bp, Zea mays
  Clone ID: LIB3180-051-P2-M1-G4
ggtaaataataatattggcagctttgtagtatcagaaactacatgagccatttgctcattgtccttgtggttggggagta

SEQ ID NO: 29822 - DNA, 243 bp, Zea mays
  Clone ID: LIB3180-051-P2-M1-G5
atataagatcttatgtggttattttttttgttggttgtgttttttgtttattatattttttttttttttaatttttttatttatttttattattttttttttttatttttttttttgttattttattttttttttttttttttatttttttatatttgtatttattttttttttattgttttttttttttttttttaattttttttgattattattaatattattttattttttgagtatttt

SEQ ID NO: 29823 - DNA, 249 bp, Zea mays
  Clone ID: LIB3180-051-P2-M1-G8
ttttcggcaaaactatcaccctcgaggtggagtcttcagacaccatcgacaacgtcaaggccaagatccaggacaaggagggcattcccccagaccagcagcggctcatctttgctggaaagcagcttgaggacgggcgcacgctggccgactacaacatccagaaggagagcacccttcacttggtgctgcgcctcaggggaggcatgcagatcttcgtgaagaccctgactggcaagactatcaccc

SEQ ID NO: 29824 - DNA, 299 bp, Zea mays
  Clone ID: LIB3180-051-P2-M1-G9
tgaacgtcatggttcagcagctgcttgtttctgttggctcccctagcaatgctcttgtgctcaagattccaattcagggtgttggggatgcacttcataggaaaacactccagggcacaagtctgaatgaagagcaaatgagacaggctagcgtcgcagacaatggtcatcgtcagctaaacaagatacttgttgacttggatcaagataacattactgctaagaattatgcaattgcattttacacaaaagagcacattcagattccatgcttgggcggtggacacgaaagtactttc

SEQ ID NO: 29825 - DNA, 219 bp, Zea mays
  Clone ID: LIB3180-051-P2-M1-H10
tctttcgcatcgattagctcgagagagggatatctgtttccgcatcggcagcgttctctgcagcggcgatgccgctcctcgaggagatgatggaatcgtcgtacatccgcacgtacctgcagcagatggcaggtaagtaggtcaacgaattgattcctctcgtggtcgttgagtgattttgacgcgacatgcgttgcgtgcatgtatttatctgctctc

SEQ ID NO: 29826 - DNA, 226 bp, Zea mays
  unsure at all n locations
  Clone ID: LIB3180-051-P2-M1-H11
tctgtttatgcgatcnntgnntnacaggccaactggatgacggctatcgaggacgagggggncccggggctggaccaccaccgcggatannaactgctctgcgtcgtccgcgcgctgctcaagaagatccgccgccgcgtgctcgtcggtgaccgcgtcctcgtcggggcggtcgactggaccgatcgccgngggatgatcgagggtgttctcgtgcggagatccg

SEQ ID NO: 29827 - DNA, 195 bp, Zea mays
  Clone ID: LIB3180-051-P2-M1-H3
tttcttatctttgttctgatctcaaagaaaagctggcgacattcccttctgaagagccaggtggcaaagagatcacattcaagcgtgtgatattgaacaattgtcaggaagcctttgaaggagctagcatcttaagagctgagatttctaaattaactggccctgaccaagggatggaaagaagagacaaagaac

SEQ ID NO: 29828 - DNA, 223 bp, Zea mays
  unsure at all n locations
  Clone ID: LIB3180-051-P2-M1-H5
tgggtgcctcaacggcttctgagaacgacatccgtttccgcattggcagaggtctggtgcatctgcgatgccnnttctttattagatttattaatcatattacatccatacgtacctgcatcagatggcaagtaagttggtcaactaattgattcctctcgtggtcattgtgagatttttatctcgtcatgcttttacgtgcattgtatcttttttatcattc

SEQ ID NO: 29829 - DNA, 52 bp, Zea mays
  Clone ID: LIB3180-051-P2-M1-H7
tctttttccggacccgagcggaggagagcaggaggaggctccaagggcgggg

SEQ ID NO: 29830 - DNA, 105 bp, Zea mays
  unsure at all n locations
  Clone ID: LIB3180-051-P2-M1-H9
tcgttcggttctgttacggatttgttgagttggaggattctacatctggccagagtgctatagaggcttcccctgtgatgattggtggncgnnnttgtttcattg

SEQ ID NO: 29831 - DNA, 64 bp, Zea mays
  Clone ID: LIB3180-052-P2-M1-A1
cagatggtgggaagctgtgcatttcccgaagtcttcttttcgaagggcaaaaaaaaaactaact

SEQ ID NO: 29832 - DNA, 120 bp, Zea mays
  Clone ID: LIB3180-052-P2-M1-A10
tcgcgaaatctgacccgggccacacttcgctgctccgccatggcgatccgctccaaggcctggatctcgctgctgctcgcgctgaccgtcggtctttcgccgggcggaggaagagcccgc

SEQ ID NO: 29833 - DNA, 119 bp, Zea mays
  Clone ID: LIB3180-052-P2-M1-A11
tcgctcgatgttcacggtgtaaacataagcgggccagcattaccaggaggcaggacgccctgtatatcgttgattcttgtgctaaacgtcaatctctccgcacttacattggacccgcc

SEQ ID NO: 29834 - DNA, 245 bp, Zea mays
  unsure at all n locations
  Clone ID: LIB3180-052-P2-M1-A12
cgaatcagtataagtatagcggaagcggctgcacgtagccgtaccggtatctgcacagtgtccgacccacgcgttcgcgtcttactgagctgagctactgtaataccgagagatcgaacaactgtggtccgtggagcgtcaagagagagagcttttgtgcattctgggggnccgggggcaacgagagagagagagagagccatgtcgtgcggaccaggatatcgcagatgcaggaggagatgata

SEQ ID NO: 29835 - DNA, 180 bp, Zea mays
  Clone ID: LIB3180-052-P2-M1-A2
gaaagctgttacgcctccaggtaccgattcccaattcgacccacgcgccacggcgaatttaactcttaaagaaaaggatgtagatgacatgcaagatacagaatttggggaggcttaaaaagaagttcaacaagaattacccgtctcccattttctgatgaatctaatattggggaaaga

SEQ ID NO: 29836 - DNA, 346 bp, Zea mays
  unsure at all n locations
  Clone ID: LIB3180-052-P2-M1-A3
gaattttatcaattattacctgtctcccattttctaatatatcttntatagggatttttgtgttattttttcaaatttatatttanagttttttgttgctntgtttctnggtgaataaacagangttttcattttttcttttatttctgtacaataattattgttttttttctcttactacagatattatgttagttttcatttctatcttgtgtgatcatataatacattttcttttattcttttttaatcacatttaattatataagaactntattattacatcttcacacaaaatgattaatttaaatttttttatttattattaattaacactctatttttt

SEQ ID NO: 29837 - DNA, 139 bp, Zea mays
  Clone ID: LIB3180-052-P2-M1-A7
ttttgtccttttcacttgacttggcttgggccaatcattctttaaaccttcttggcgcctttggcctttttttttcctttccaagaaaaacctttcttcttcttttgccaggggccttttggttctcctttccgggctt

SEQ ID NO: 29838 - DNA, 214 bp, Zea mays
  Clone ID: LIB3180-052-P2-M1-A8
tttaacctagctagcctgcacgcactgacactgaccacgaccagcgctcagccttctgctccggaagctagctcaccggccagccaccccaccccgtccacccgacaatggcggccgccgtggccctcctcctgctctccgccctcggcggagcggcggcgcaggtgttccctccgtggaacggcacgttcccgatgggtcccgggttctttgg

SEQ ID NO: 29839 - DNA, 55 bp, Zea mays
  Clone ID: LIB3180-052-P2-M1-A9
ttttagggaaaccaatggcaacaaaggggggggggcattttaaaagggggggggg

SEQ ID NO: 29840 - DNA, 100 bp, Zea mays
  Clone ID: LIB3180-052-P2-M1-B1
tctcgtatagagaaagaaaaatatccccaaagggtagattccgatcttaatggggggcccctaattattatttgtgataagcgtgggccgggcccccggc

SEQ ID NO: 29841 - DNA, 252 bp, Zea mays
  Clone ID: LIB3180-052-P2-M1-B11
agcaaagcggcagtgcgtagagaggatcgtcgaacagaacagcatgaagatggtcatcgttctcgtcgtgtgcctggctctgtcagctgccagcgcctctgcaatgcagatgccctgcccctgcgcggggctgcagggcttgtacggcgctggcgccggcctgacgacgatgatgggcgccggcgggctgtacccctacgcggtgtacctgaggcagtcgcatgtcatcccgcttgcgttggtaccctacta

SEQ ID NO: 29842 - DNA, 200 bp, Zea mays
  unsure at all n locations
  Clone ID: LIB3180-052-P2-M1-B12
ctggcgtgaagctggttccgcgagaccagatccagtctgatcagaggcgtgggggtgaccacggctccgattccgactcctcccacggcaagaggccgttgaagcacattaaacgagggcgggtcaagaaagagaggacgattctaaacatccggcgttagcggcggcggagctagaggtactattnggaagattttttg

SEQ ID NO: 29843 - DNA, 130 bp, Zea mays
  Clone ID: LIB3180-052-P2-M1-B3
tgctttttttgaagccgccgccgctgcagtgtccatagccaccgtaagagactgagatgcgtctttctttccatacttagttttacttctctacatttgtttctttcttttttttttttttccttagttc

SEQ ID NO: 29844 - DNA, 75 bp, Zea mays
  unsure at all n locations
  Clone ID: LIB3180-052-P2-M1-B4
ttctgctggtctagtcaaaagcattncaaccacaaacgagctctctcttaaagggcttgtgttttttatataaca

SEQ ID NO: 29845 - DNA, 441 bp, Zea mays
  unsure at all n locations
  Clone ID: LIB3180-052-P2-M1-B8
tgcagagctgcagtgagagcaagtgtgaggatcagatgaggcatccgtgaccaatgatcgagtagccatgttgatgtgagattaacgccctctttttcnctctcatagagctcctggtattccttattttttgttttttttaatacttggggnctgtttttctgtnntcnggaatttttttttttttttgctccccggtttttggactnnnngtnnnnccnttntntaaattnttttattttttttnnntattccnttttatttttttggtttttttttttttttttgtttttttntttgttnttgttaatttttttaaattttttttattntantatattttttttgtttttttttatatctctttnntnctttaaatatatttttgttatttatactttttatcttttattttgtatatttcctttcctttttttattt

SEQ ID NO: 29846 - DNA, 188 bp, Zea mays
  Clone ID: LIB3180-052-P2-M1-B9
ttcgttcgctgaaaactgccctaatggctggggtactcctcccgatgattcatttatggccagaggcccagaatatcttacaaacaaggtaaaaataccaggtggagagtatattctgaagcctctcggcttttattggatcaaaggaccagtaaaaaatagttggatttttttaagacagttaccat

SEQ ID NO: 29847 - DNA, 401 bp, Zea mays
  Clone ID: LIB3180-052-P2-M1-C1
tctcccagttcgtcatcaagtcgttgcctttattttttttatcccttccctgggtgatcgctattgctattgctacaacaagtggtcagggaattcaggtgcatctgctgtttggtttaggctctctgctggcagttcgtgagggcagcatgagggcgccgctgctgctattggcggccgccacgtggctggccgtcaacgccgtggcgcaccctggcagacctggcggcggcggccgggagcaaccgctttcgaggatcgccgtcgagagcgcggtcctcgccgtcgacgatgcggcgcacgtcagggcgtcccccttggtactggggctcaagggcgagagcagcgatgggtggacctggagttttttcatcccgacccatccagcgacgactggatcg

SEQ ID NO: 29848 - DNA, 291 bp, Zea mays
  Clone ID: LIB3180-052-P2-M1-C10
tgctatggtccgctgtctagcagaaagtgcgtcgctttgccaaaattgggaggggaatggccacattgcaggatcctcatctgccggacacaaaaggcagactataaattgctattcaggatgtccatcgtctgcagaactttctagaatatggtccttcgtttcagatattcctaatgtagcacctgagccaaactgtaagcaaggaataagcatgataagcatcatcgacagtggtgtcaggtaccaagataatgctgcaggggacagtttttttttagatataactag

SEQ ID NO: 29849 - DNA, 394 bp, Zea mays
  Clone ID: LIB3180-052-P2-M1-C12
agaaattgcaaaggcaaaatctccttgggattttgtaccagcagggcacagaatagggaagcctgcacctatgttcaaggaattgaaagatgaagacgtagctctccatagagaaaaatatgcagggagtcaagctgagagaagctcaaaagcagcagctgatgctgaagccaacaaagtcgctaagcagctcaagggcacaaaattatctgatggaggaacaaaaaaggaaccaaagaaacaatctggtggttcaaaagcgaagacagctgaggctattacggttgcaaaattggatattagagtgggacttatcagaaaagcagagaagcatccagatgctgattccctttacgtggaggagattgatgttggagaggacacaccaagaaca

SEQ ID NO: 29850 - DNA, 286 bp, Zea mays
  Clone ID: LIB3180-052-P2-M1-C2
ttgggttgcctggggataccagagttacccctttgagactcaagaagcccggcgggggcttaatttccagaaaatattattccagggccgattggtccacctcgcgtttcggaaggtggaacacacagtcgccttgtccggttggttaaaagaatgggatccggttaattgttggcattttcccccttgtggggccttttgtccggttatccttaaaattgtggcaattacctcctctttttaaggccttttttcataccttatataaagccaaagtcggaggttc

SEQ ID NO: 29851 - DNA, 261 bp, Zea mays
  Clone ID: LIB3180-052-P2-M1-C3
ttcttcttctcgtccacagaatggggggtttcgtggggactcataagaccaaggcggagttcaaacgtttccaagttaaattcaatagaaggctgtctgtcaagacagactacagggccagtataaggctgattaaccaagacaaaaacaagtacaacacacccaaatacatatttgtttcgcgatttaccaacaaggacatcacttcccaaattatatttgctagtatagcttttgatatggatcttgcttctgtctact

SEQ ID NO: 29852 - DNA, 145 bp, Zea mays
  Clone ID: LIB3180-052-P2-M1-C5
ctactatagaaagctgtacgcctgcacggtaccgttcccgaatttccctgttaccccacacacttctattttctccatctatacatcactatatcgcacggttattcagacaggaccgtgggtgcttctcaactaccccttttat

SEQ ID NO: 29853 - DNA, 394 bp, Zea mays
  Clone ID: LIB3180-052-P2-M1-C6
cctgcatgcaccgtcccggaattcctttctggaccgacccattcgttcaagcatttgattagcgcaagaaaattcatgtgattctggtccagccggggacaaaatatgaaaacctgcacctatggtcaagcgaatggcgagatgatgacataacgtgtcatcgtgaaacacttatgcggaggtaagcttaaaaaaacttaaaaaccgcaacttattcttaaacccacaaaatcgcttaacaagttaagggcacaaaattatctgatggaggaacaaaaaaggaacccaagaaacaatctggtggttcaaaagcgaagacagctgaggctattaccgttgcaaaattggatattagagtgggacttatcagaaaagcagagaagcattcagatgc

SEQ ID NO: 29854 - DNA, 379 bp, Zea mays
  unsure at all n locations
  Clone ID: LIB3180-052-P2-M1-C7
tgcttcacagaccaaccaaactaaagcagcggtggtcgcgtcgccggcgggtactcgcgtgcgtgccaggaagacgaaccaccagccagcccaggccccaggccaacacgcacgccgtcgctacctggcgaggaaggctgcctgcctgatggtccaggacgaaggctcgtggtcgtcgggcacatcgtacgcgcttcacaacatcttcaccatgccggtgcactccttttccatcgactctaaattcagtcgatccctttggggtttcgtcaggtggggcgttgttcaatttttgcaaacttttttaaatcccttcttatgtnttagattcctttttttttgtatatatttttcatnnngttttccccttatatttttt

SEQ ID NO: 29855 - DNA, 244 bp, Zea mays
  Clone ID: LIB3180-052-P2-M1-C8
tctggtttctttgaggtcactcatgatgtctgtcaccttacatgtgctgattggctccgtgctcctggggtccagacacctgttattgtccgtttctctacagttgtgcatgagcgtggaagcccttggaccttgagggatccacgtggttttgctgtcaagttctacaccagagtgtggtactttgaccttcgtggtaacaacatgccctgggtttttcattactttatgggattaaatttcc

SEQ ID NO: 29856 - DNA, 99 bp, Zea mays
  Clone ID: LIB3180-052-P2-M1-C9
tctctcctaattctatatctttttacacttaataaagcgtattttctcacatgcgggtggtccccttacacttcacttcattctcttgttccttttcct

SEQ ID NO: 29857 - DNA, 295 bp, Zea mays
  unsure at all n locations
  Clone ID: LIB3180-052-P2-M1-D1
gtcgtcgggaactgtactggctttgcagttaataggatgttctttccatacactcaatcagcactcttttatgttgatcttggtatggatgtttataagattgatcgtgcttgtaccaaatttggaatgcctatgggtcctttcagactggcagatctggttggttttggtgtggctgtngtcactggtttgcagtaccttgaaagttttccagagaggggttacatattaatgctacttcctatgatgatggagggcaatatttcaggttaagccaccctatttggatttttca

SEQ ID NO: 29858 - DNA, 392 bp, Zea mays
  Clone ID: LIB3180-052-P2-M1-D10
cagggaccttcggccttgggatgaaggtgtacacgatatgaaaggcgcgatctgggagaaggatgaaccagttccgaagctacgtaaggagaagctttggcttagcggtggaaaataaaaccgacttaaaggggaaaaggctgtctagtcctcgatagattatcccttagtcaatagtaaatgtcaagggtatggatgtaattttacataggatgcgtcatgtgcctataaatagatgaacaatagcatcgtactgttcacgctgatttgtattcactcgcacgtcacacttggattcataccttctgtcaagccgaaagtacaaatgtaatttaatatcgttactgcttattcgggattgttcaatgagaaattaaataatctaatgattt

SEQ ID NO: 29859 - DNA, 103 bp, Zea mays
  Clone ID: LIB3180-052-P2-M1-D11
tctaccagaagctcctcctcgccttcgaggacttcctacgccacccggggagcgcgcccaacacagcaccccaccgtcgaagtataagacacggtacgcaccc

SEQ ID NO: 29860 - DNA, 264 bp, Zea mays
  Clone ID: LIB3180-052-P2-M1-D12
ctgggggcttcagcaaggggcagccccacttcgccgagaacatcttcaaagggatcgacgcccggttcctgagcgaagccctgggcgtcagcatgcacgtcgccgagaagctgcagagccggcgtgaccagcgaggcgagatcgtccgcgtggagccggagcacggctttcaccagctgaatccgtcgccgtcgtcgtcgtcgttttcgttcccatcgtcacaagtccagtaccaaacgtgccagcgcgacgtcgacaggcaca

SEQ ID NO: 29861 - DNA, 404 bp, Zea mays
  Clone ID: LIB3180-052-P2-M1-D2
agcaacatagaaagtggaatacagtagcaacaatagagcaacaatggcggccaagatattttccatccttatgctccttgctctttctgcatgtgttgctaacgcgaccatttttcctcaatactcacaagctcctatagctgcccttcttcccccataccttccatcaatgaccgcttcagtatgtgaaaacccagcccttcaaccctacaggctccaacaagcaatcgcaacaagcaacttacctttatcacccctgttctttcaacaatcgccagccctatctttggtgcagtcattggtacaaaccatcagggcacaacagctgcagcaactcgtgctaccagtgatcagccaagtagctctggcaaacctttcttcctactctcagcaacaacaatttc

SEQ ID NO: 29862 - DNA, 391 bp, Zea mays
  Clone ID: LIB3180-052-P2-M1-D3
tcagttctcgatccgaagctgtgcctcgtaccattgggatccaatggcgcggacggggaatctgacgactgacattaagcgcgcttcgcggtctgacgcgtaccatactcatttgctctgaatacatcaaggccaataacatctgtacttcttcccacatacgctctaattaacgaccgtatgagtatgtgtaaacacattcctttaaccgtacaggctccatcatgcattctgaacaagcattcttacctttattacccttgttctttcaacaatcggcagccgtaggtgtggggcattcattggatcaaaccattatggctcaacagttgtttattcttgtgctaccagtgatctttcaagaagctttaacaaacctttctgtctactt

SEQ ID NO: 29863 - DNA, 356 bp, Zea mays
  unsure at all n locations
  Clone ID: LIB3180-052-P2-M1-D5
ttcccttctccacccacacattcttttctacatctgtttcaaaccacctttagcttcttgatccaatgaaagagagcatccatataaaacttccantaaactttttnaatgnttttnnttatttatttattttcactttcnnttncnttttttttttccttaccccntttaccncatattttatctattatttcttccttcttttttnttcctatattatttttttatttttcttatttcaatcattttttactttttttattcaattttttttttcactaatttttattttacctttattactcttttttatattatttctttcctattttatttatatttctttctaacttttt

SEQ ID NO: 29864 - DNA, 345 bp, Zea mays
  Clone ID: LIB3180-052-P2-M1-D6
gatcacactcgtagagagaaggaaaaatatccccaaaccctagctcccgatctcgatggcgaaccctcgcgtcttcttcgacatgaccgtcggcggcgccccggcgggccggatcgtgatggagctgtacgccaacgaggtgcccaagaccgcggagaacttccgcgcgctgtgcacgggcgagaagggcgtgggcaagtccgggaagccgctccactacaagggctccaccttccaccgcgtcatccccgagttcatgtgccagggcggcgacttcacccgcggcaacggcaccggcggcgagtccatctacggcgagaagttccccgacgagaagttcgtgcg

SEQ ID NO: 29865 - DNA, 343 bp, Zea mays
  unsure at all n locations
  Clone ID: LIB3180-052-P2-M1-D7
ccagtacctagttcagagaaaaaagattgtgccaaaccagcagaaagcaagacccagtctacatctggaatggaagacttatttaaagactcaccagctgtgccattatcctcagctccagctgtttcccaagtaaacgctaagaatgatatcatgagtttgtttgagaagtccaatatggtatcacctttcgctgcccatcaacagcagctggcgctcatgtctcagcagcaagctcttttaatggctgctctcaaagctggaaatgcaccacaaatgatgattncagggactgccaatcatttaaatgctaacggaaccttgccttttcaaaactggacaa

SEQ ID NO: 29866 - DNA, 367 bp, Zea mays
  unsure at all n locations
  Clone ID: LIB3180-052-P2-M1-D8
gagcatcgtaaccacaatgctcctggcttcccctgtagattctatctatctgcatttagaggcttctcagttctctggcagcataacaacgcggtcaggtagattggagatatagatggtagtggtcaggtagattggagatatagatggtagtgatacaggtcgcaacctatgtgtgacctttttcttactgtacattccagtgtcacagcaagggtgcanncatnatttgcccgtttcagtcttgttctacttactggcctgacattgtgcgatatctgctgttgctaaagcttaatctctgtaaattctactcgcgtgacgtgcccggtcatgagctggtgttttattctgcttgcccgttgtg

SEQ ID NO: 29867 - DNA, 418 bp, Zea mays
  Clone ID: LIB3180-052-P2-M1-D9
aggagtccgggtgaacctaacaaaattgaaccgattccccctccctccggctctaaacatatcgacaattcctcctccctcctcccatcgcttgcccctcgctcccctccctctccgcgccgccccctctcgaatcgaaatccctctccgccatgccgaagggcgccaagaagcgcgccaagctcaagaagcagcagcagcagggccaccccgacgatgccggcaacaccaacgccagcaacggcaactgtaacggctgcgatgacaacaacagcgcctcgagcggccgcgacggcgaccaccacctgcggatcccacccaaagtttctcgtgtggatgcgaacgaggactccatggagagctctgaggagatggtcaccccccgagctgccgcgtcggagccggatgaggaggagac

SEQ ID NO: 29868 - DNA, 245 bp, Zea mays
  Clone ID: LIB3180-052-P2-M1-E10
tctttcgttaaaaacggcggtctgccctaaagccctctctcccaaagccatgtggcgtccgcggactagttttttctgaagattcggcgatggcggcgacgatccaatccgtgaaggcgcgccagatctttgacagccgcggcaaccctacagtcgaggtcgacgtgtcttgctcagatggaacctttgcaaggtcagctgtttccagtggagcattaactggtgtatatgaagctctgttagtt

SEQ ID NO: 29869 - DNA, 203 bp, Zea mays
  Clone ID: LIB3180-052-P2-M1-E11
tcctcggagctcgacgaggacgaccgacgacgcacgcatagatccggcgtgactgcaaattttgaaaactgaactgtaagatggcatcagcagagctttcccgtgaggaaaatgtgtacatggcgaagctcgccgagcaggcggagaggtacgaggagatggttgagttcatggttataggtaaccaagtacatgttgtaatc

SEQ ID NO: 29870 - DNA, 375 bp, Zea mays
  unsure at all n locations
  Clone ID: LIB3180-052-P2-M1-E12
ttctatcgcttcacaaccaaaggtggaggaaaaaaagcttacccaggctcctgaggtggaggccccaaagattgaataagcttcttaatctgaagatcgcatatttgccagccctcttgcccgtaaactgtctgaagataacagtgtcccactatcaagtgtgaaaggtactggtcctgatgggcgtatttttaaggcagncnttcaatattccttntccaagggtgnnnctnannttggctcnntgttctnnngcctttnngttccttnntgtttgagtgggggggtgcnnnattaattttttaannnttttaaatccttttttgggccgcangtttggttttgtcctttttttcttgtcttgagttaagtttt

SEQ ID NO: 29871 - DNA, 275 bp, Zea mays
  Clone ID: LIB3180-052-P2-M1-E2
tctcactcgggcgaggcggctaaggccccctcaccgtccaccggcgactgggccggccgtcgcttccgccctgcctcttcaccgtcgccggcgacgagcaccaccaggtgtttttgagtctctgttgcgagtgttgtggccatgtccatgttcaataggatcttcgggaagcccaaggagcaggccaacttcaatgctttggccactctggacaagttaaatgagacacttgatatgctggagaagaaagaaaaggtgctggagaaaaaagcaaa

SEQ ID NO: 29872 - DNA, 164 bp, Zea mays
  Clone ID: LIB3180-052-P2-M1-E4
actggaggcgatgcaggacatggagacggtgtgccaggagctcttgcggctgccggcggaagacaaggccgggctgtactcggaggacacggggagggcgacccggatctactccagcaccatgttcgacacgggcgccgagaagttctggcgcgactgccttc

SEQ ID NO: 29873 - DNA, 406 bp, Zea mays
  Clone ID: LIB3180-052-P2-M1-E6
tacgactgctacgtcctgggctcttacgccgggttcctgtgggacgccgaggaggacgaagaagagatctccgagccattgccaccgccttcgctgttccagggggcagctcagcgtccttccatcacagcggcctcttagatgatcgtgaactcgatctagatctcaccaccgcctgtgaacgaagctgaatctggaaccctggagagtggagagtgactgggtgataaccgtgcagaaacccccgacgagtgactcacatcgccggccggctcctcgccggttgttaactgaatcacggcacatgtaaaactgaatctggaagagcacacacgcgccgcgcctaagcctattagcgtctatagactttgcagggctatggatagtagatatgtagattgagacc

SEQ ID NO: 29874 - DNA, 231 bp, Zea mays
  unsure at all n locations
  Clone ID: LIB3180-052-P2-M1-E7
cgcagaccgggagtagtcgacgcgccggcactgaatcctcagatcacggggagccgtaatcacgccactctgctgactcccggcgagcagtgtaacattttccttcagccatgggcaaggagaagactcacatcaacattgtggtcattggacatgtctactttggcaagtattccacnatttttnacctgttctacaatctctgttgttttgacattntttntnattttt

SEQ ID NO: 29875 - DNA, 158 bp, Zea mays
  Clone ID: LIB3180-052-P2-M1-E8
tcgtttcaaccttggaatcctcgccaaattgacccagctgcttgaatgtgtgcctcatgctgtggacgtgagaaaggtgtggagcaagttgaggctcatggttggagctaagaacggtaggatatgggcatttctaacttcggtgtcacttggtgggc

SEQ ID NO: 29876 - DNA, 343 bp, Zea mays
  unsure at all n locations
  Clone ID: LIB3180-052-P2-M1-E9
tctnctgctcatgtactggggcaagccgttctagacgactccgcccatcatgtcctgagggcgagggcaggtggnggttttttttcatgttgtgtctcatgtttggtgctttgaacgtttatttttcctacatttcttactttttttttttcttgatttctaattttttcttttgttttttattgcttcatccttatatacttcgtcagtttatatattttctctttcatttcttacctttattttccttaattttttttttgtaataagtttttacataatatcatttctctaattatatttaattatattaaattccatatttatttttttcttaatttat

SEQ ID NO: 29877 - DNA, 299 bp, Zea mays
  unsure at all n locations
  Clone ID: LIB3180-052-P2-M1-F1
ttgcagcagtagcagctccagcatcttctagcttattcattcatgggattcggtctctactaggattaggggtgcttcatttcatccgatccccaacgacttgacctgattctgatctcgacgacgatgcggaagcgggatctgggcatcctgctgctcgccgncttcgccatcttcttctccctccaccacgaatgcgacttctccttccgggagtcctggtaccacctcaccgacgaggacttccccatcaagtacgaggccgaccgccttgccccgccgttcgtcgccgatctcaa

SEQ ID NO: 29878 - DNA, 328 bp, Zea mays
  Clone ID: LIB3180-052-P2-M1-F10
tctttcgcagaccattagctttatctactccagagcgcataagaacccgatcgacaccatgcgggtgttgctcgttgccctcgctctcctggctctcgctgcgagcgccacctgcacgcatacaagcggcggctgcggctgccatccaccgtcgtcggttcatctaccgacgccggtgcatctgccacctgcggttcacctgccacctacggtgcatgtcccaccgccgatccacctgccgccggcgtttcaccatgcaccagcggtccatgtgccggcgccggctatgtgccgacgccaccatgccactaccctactcaaccgcccc

SEQ ID NO: 29879 - DNA, 153 bp, Zea mays
  Clone ID: LIB3180-052-P2-M1-F11
tcgggtggaagctacaaatataacatcggttgacttgaccaaccaaccaattccatttgtgcttggttgacccttgaagtcaatgtgaagcaacatttaactggttgcttaaggctcaccttattgggataatctggactacatctacactga

SEQ ID NO: 29880 - DNA, 280 bp, Zea mays
  Clone ID: LIB3180-052-P2-M1-F12
tcccacgcaaacctctcctcaactcgatcaaaccggggacggaaaaggcccaccaaaatcccccaaaatttcgtacctcctcagccccagcaatctcgaatcccgatgctcacagcctccaccgaatccctggcggtcgtcatcagcgcatgagctttcttcgctcgctagcggactccttctcatcgctgctcttctcgtcgggaggcggggcggtgtccatggacgcggcgggggcggccccgtcgccggcggcggtggtgggggagcgcctggcggt

SEQ ID NO: 29881 - DNA, 414 bp, Zea mays
  unsure at all n locations
  Clone ID: LIB3180-052-P2-M1-F3
ggaaggctcttcaagtcctctgaacccatggagctgacagaggcagaaactgaatatgctgttagggtgggtaaacacatttatgacggcttcattgtattgcagtacaattgtgcaaacactatagaagaacaactggttgaaagatgtactggttggcgtgatgccctaaatgctgaagagttttcaaagatttgttcaaagccctttgcaagcttgccgtataattcacctgggcaagtttttgttgcttttgaaaagccagagcgtgtacctggttgttggaagtttttaaatttgttgaagtttacagttaaagaggttgacacaactacnggggaagctgatgaggatggggttgaggatgaataccagttagaggactttgaaattgtttcagctgattatatgctg

SEQ ID NO: 29882 - DNA, 71 bp, Zea mays
  Clone ID: LIB3180-052-P2-M1-F4
gccagtccgggcccggttaaccgtcggccacctggctccggccaaggccccggcacgcttggccacgcggg

SEQ ID NO: 29883 - DNA, 60 bp, Zea mays
  Clone ID: LIB3180-052-P2-M1-F5
gccgaaaccgaccaaactactcgtccaacctccaaagggaggggccaggggatttaattt

SEQ ID NO: 29884 - DNA, 307 bp, Zea mays
  unsure at all n locations
  Clone ID: LIB3180-052-P2-M1-F6
cccggccattattcccgggtccacccccccctttttacaaagataggcttnnttttactcgcctacctccgcggatcaaacctttcccctttttcccaattcccgccgccgttccatcccgtaacgcgacaccatgagggagtgcatttcgatccacatcggccaagcccgtatccaagtcggaaacgcgtgctgggagctgtactgccttgagcatggcattcaagctgacggtcagatgcccggtgacaagaccattgggggaggtgatgatgctttcaacaccttcttcagtgagactggtgct

SEQ ID NO: 29885 - DNA, 374 bp, Zea mays
  Clone ID: LIB3180-052-P2-M1-F8
tattgagaccaacaagcaacatagaaagtggaatccagtagcaacaatagagcaacaatggcgaccaagatattttccctccttatgctccttgctctttctgcatgtgttgctaacgcgacaattttccctcaatgctcacaagctcctatagcttcccttcttcccccataccttccatcaatgatagcttcagtatgtgaaaacccagctcttcaaccctataggctccaacaagcaatcgcagcaagcaacatacctttatcacccttggttcaacaatcgccagccctatctttggtgcagtcattggtacaaaccatcagggcacaagagctgcagcaactcgtgctacctgtgatcaaccaagtagc

SEQ ID NO: 29886 - DNA, 264 bp, Zea mays
  Clone ID: LIB3180-052-P2-M1-G1
tcgggaagatgctcgagataatcttgtagcttccgagaaaagagtaagagagctggaagctcagcttcaggacgagcagatagtatcaaccaacaatcgaaagaaatcagaaaatctggaaactgaattgagaaaactgaagaaggaactcgacaatgagaaggctgctcgagaagaagcatgggcaaagggttcagctcttgagcttgaaatagctgcaacgattagagatctatcaattgagaaacaaaggtatcaaggagc

SEQ ID NO: 29887 - DNA, 361 bp, Zea mays
  unsure at all n locations
  Clone ID: LIB3180-052-P2-M1-G11
ttttnctgccttacgactaggacgacgcaagcaccgggcatcctacaacggagggggggtgcccaagtctctgtcgggccttgttcggcaacgagcaccctacagatggctgggaggcacaccattattgtgatgcagccatcttaaaatagggcttgtagaacatttatggaatacaataacattaatcatgcatcggatggaatctgtgtgctttatgaaaagaaaactaaggatatcaacccaaagatccgaaacataacttatgacatcaacgacctctataactacagtgatggcctaggccacattaacacgcatggttatgaaaactctattcagacattcctgccataaacat

SEQ ID NO: 29888 - DNA, 287 bp, Zea mays
  Clone ID: LIB3180-052-P2-M1-G12
gtccttctttttaatgtgctgacgtaatagctgatgtggtgcttggaatggtggaacaccaaatgatctttttcatactcaacctttttttgctggtgggttgagtgataggcttgccaaatttgtgcgatctgagggtgctcttgggctctacaagggaattgttcctctctggggtcgtcagattccttataccatgatgaagtttgcttcctaagttaatatgtgctgctgcatgggttgtgattttacctgtgacttacgcgtacacttgggagaatcctact

SEQ ID NO: 29889 - DNA, 359 bp, Zea mays
  Clone ID: LIB3180-052-P2-M1-G2
cgaaggcattttccgtgctatggatggactcccggtgaccattcgacttctggacccttcccttcacgagttcctttcagaagggaacatcgaggacattgtaagtgaattatgtgctgagaccggagccaaccaggaggatgccctcgcgcgaattggaaagctttcaaaagtaaacccgatgcttggcttccgtgggtgcaagcttggtatatcgtaccctgaattgacagagatgcaagcccgggccatttttgaagctgctatagcaatgaccaaccagggtgttcaagtgttcccagagataatggttcctcttgttggaacaccacaggaactggggcatcaagtgactctta

SEQ ID NO: 29890 - DNA, 416 bp, Zea mays
  Clone ID: LIB3180-052-P2-M1-G3
ttcgtttttattttccgtgctatggatggactccgggtgaccatgcgactgcgggacgctcccctacacgagttccttccagaatggaacatccaggtcatggtaagtgaatcacgtgctgagacgggagccaaccaggaagatgccctcgcgcgaatcgaaaagctctaagaagtaaacgcgaagctgggctacctggagagcatgctaggtatatcgcaccctgaattgtcagagatgcaagaccgagccattttggaagctgctatagcaatgaccaaccagagggatcaagtgttcgcagaaataatgcgccctatggctggaacaccacaggaactggggcattaagtgactattatccgccaagttgctcagaaagtagtcgccaaagtgggcaagactatcaggtacaa

SEQ ID NO: 29891 - DNA, 224 bp, Zea mays
  Clone ID: LIB3180-052-P2-M1-G4
tgctttctcgttctgggccgtctccatcgtcctaagccacctgctcaggctgtgggcgctctattccacgacgaccagcacccagcaaacctcaagaaattggtaatggtaaggtcatacatccccttggctgccacaatggctccccaatggccaaggctgcttctgttggcaaagaaccaccaacgaacgttgctcttatccttggtagggcggtctcgcca

SEQ ID NO: 29892 - DNA, 108 bp, Zea mays
  Clone ID: LIB3180-052-P2-M1-G7
tcgcgctacagagctgactgtatcagcaacactgaagcaaaagagttcttcagttgaaagtgtggaaaagtggccctatgaagctgctgctctagcatttgaggcaat

SEQ ID NO: 29893 - DNA, 95 bp, Zea mays
  Clone ID: LIB3180-052-P2-M1-G8
cctttggcaatgattgatagacgtgccgatgaccgcattgtccatgggaagtggttcaatctcgagaagcctgttcttggtgatgttgaccaact

SEQ ID NO: 29894 - DNA, 354 bp, Zea mays
  Clone ID: LIB3180-052-P2-M1-G9
ccgccgcctccggagaagggtccacggcggcgtccttcctcgggaggcgctcggctcggattcgctcctgctcggcggcggcgtcgccggctggtgggctcgcgcgcgcacctggtgctgggctccgcgggcgctcctcgtgcgtgacacgcgcccgatgcgtcaggatcgcgcggccggcgcccggggcctgccgtgattctgcggggaggctggatctcggtgcttccgcgtgcgggaaccagtgagttttctttttgtcttctcttccccggcggctagcggcgggccgcttggtgcacgtcaacgcgggaggcccgaggttaaccgatctggtgctctcgccgcccggag

SEQ ID NO: 29895 - DNA, 415 bp, Zea mays
  Clone ID: LIB3180-052-P2-M1-H10
tcgtcttaatattgtccttacaggccatgataattattgcttggaatggtggaacaccaagtgatatttttgatgctggagtatttaagaaggttttgagcatatttattactgctgcaattttgaagttgggtcaagcaatcctagacctcatatttggttggaaagcaagaagaaacatgtcatttgcagtcaagctgcgatatatcttgaagttaatatgtgctgctgcatgggttgtgattttacctgtgacttacgcgtacacttgggagaatcctactggacttgcaagaacaataaaaagttggcttggtgatggtcagaatcagccatctttgtacatattggccatagtgatatatatggcaccaaacatagttgcttctatgctatctcttttcccatttatgag

SEQ ID NO: 29896 - DNA, 128 bp, Zea mays
  Clone ID: LIB3180-052-P2-M1-H11
ggcccaagccgtccgggccgggcttccaagggggctctccccggccgccatttcccctttaagaaccctccccctttacaatttttggggtcctaccggccccttcttggccggttttttttccgcgg

SEQ ID NO: 29897 - DNA, 312 bp, Zea mays
  Clone ID: LIB3180-052-P2-M1-H12
tgtgttcggcaacatggggaacacctctggcaccggcgtgctcttcactaggaaccccaacaccggagagaagaagctgtacggcgagttcctggtgaatgcccagggcgaggatgtggttgctggaatcagaaccccggaggatcttgatgccatgaaggacgttatgccacaagcctaccaagagctagtcgacaactgcaggatactggagagccactataaagaaatgcaggacatcgaatttactgttcaggagagcaggttgtggatgttgcagtgcaagacagggaaacgtacggtcaaaagcgc

SEQ ID NO: 29898 - DNA, 209 bp, Zea mays
  Clone ID: LIB3180-052-P2-M1-H3
attcactgaaaggaaggcattcaaatcacaggtcaacattagaggtcccaatattctggttcatacataatgaacccatattattggacaaacattatcaagccaagggtctctcaaatatggtcggagtaggtcaatcagatgatgattcccgggaaaggcatttgcagtgcaatggaagacccatcttattggatttggggaaaccg

SEQ ID NO: 29899 - DNA, 328 bp, Zea mays
  Clone ID: LIB3180-052-P2-M1-H4
gcatctgctgaggtaattgctgatgtggctctctgcccttttgaagctgtgaaggtacgtgtgcagacacaacctggatttgctcgtggattgagtgatgggctccccaaatttgtccgatctgagggtgttcttgggctctacaagggaattgttcctctctggggtcgtcagattccttataccatgatgaagtttgcttcctttgagaccatcgttgagcttatctacaagcatgctgtgcctgttccgaagtctgagtgcagcaagactacccagttgggtattagctttgctggtggttacattgccggtgtcttctgtgcta

SEQ ID NO: 29900 - DNA, 248 bp, Zea mays
  Clone ID: LIB3180-052-P2-M1-H5
tcgaagttcaatctcacctccaaccatgggtaaagagaagtcccacatcaacattgtggttattggccacgttgactcttgcaagtcgaccaccacaagacacctgatctacaagcttggaggcattgacaagcgtgtgatcgagaggtttgagaaggaggctgctgaaatgaacaagcggtccttcaagtacgcatgggtgctcgacaagctcaaggctgagcgtgagagaagtatcaccattgata

SEQ ID NO: 29901 - DNA, 190 bp, Zea mays
  Clone ID: LIB3180-052-P2-M1-H6
ttattcactgccaagagagtgagcgagcgagcagaggcagcgcagcaatggcggcggcaatagtactctccggccaggtgcggccgcttccctcgtcgctgcccctgtccctgctgctgctcctcctcctgtgctgctccggcacctcgtggggatggagcacgttccggggaggagccgccagggagtg

SEQ ID NO: 29902 - DNA, 60 bp, Zea mays
  unsure at all n locations
  Clone ID: LIB3180-053-P2-M1-A1
cccgaccagcccgacctcatcttctcctcgtcggcttcacccctccaccaccttncatgg

SEQ ID NO: 29903 - DNA, 343 bp, Zea mays
  Clone ID: LIB3180-053-P2-M1-A10
tctatcacacccagcggtcgtataccctgtagcggggtactgctaagaacaaagacgagaaggtccacgccgttccgacgccacaccggaaccgcatcacactacaagccatcttcttccaccgaacgtgcggcctacatagatcgcacccaccggatcgatggtacctccgcgcgcggctccgacctcatcttcctacatcgactggcatctgcagcggcggcgtgttcccggccagccttcgaaagggtaatcaatcgccagacttttgggagcttctgttgggggggaccggggggaagagccaagttactgcagaagctaacatttcggttgtcgagtg

SEQ ID NO: 29904 - DNA, 198 bp, Zea mays
  Clone ID: LIB3180-053-P2-M1-A11
tttatgcgaccctaccacaactgcagccacagttgccattcaaccaactggcgttgacacacccatcatcattataccaacaacccatcattggtggagccctcttttagatttcttatgagttatagttcaataataaagttttttgtctgatgtttgtggcttcccagaaataagaaagtacatttctagattctt

SEQ ID NO: 29905 - DNA, 164 bp, Zea mays
  Clone ID: LIB3180-053-P2-M1-A12
ttcgtctgttgatcttcacgcaggcccgggaggaggtcaccatcggcgagtgggccggcacctctgccgagaaggaggtcgcctcgctccgcgcggaggtcgaacgcctcgatgcccttctcaggatcgagaatggccagcactagcttgacaaagcatagaca

SEQ ID NO: 29906 - DNA, 356 bp, Zea mays
  Clone ID: LIB3180-053-P2-M1-A3
caagagttcatggatgaagtttttgcccagagcaagaagttctttgaccttcctcatagtgagaaaatgaagcttctccgagacgagaagaatagagggtacacacccatgctagatgaaattcttgatcctgaaaatcaagtgaatggtgactacaaggaaggatattatattggagttgaggtacctgcagatgatccagaagcaaacaggccattttatggtccaaatcagtggccttctaaagaagtattaccaaaatggagagaagtgatggagcaatatcacagggaggcgttgagagtagcaaaatcagtcgcaaggatcatcgctctcgctctagatctagatgtgga

SEQ ID NO: 29907 - DNA, 285 bp, Zea mays
  Clone ID: LIB3180-053-P2-M1-A5
tcgctctcgggcaggtctgcctctgcccgggtcttcgccttcctcttccagtccccgcgcgcgagatcgccgccccgtgtgggccctagatcccgatggccttgcgccgacgaccctgctcaaggtcatcatactcggcgatagtggggttgggaagacttccttgatgaaccaatatgggaacaagaagttcagcaatcagtacaaggctacgattggggcggatttacttaccaaggaggtgcaattcgagggcaggctcttaactctgtgaatatgggacac

SEQ ID NO: 29908 - DNA, 426 bp, Zea mays
  Clone ID: LIB3180-053-P2-M1-A6
ttgctctttgacaggcctccctctccccggctctccgccttcctcttccagtgcccgcgcgcgagatcgccgccccgtgtgggccctagatcccgatggcctcgcgccgccgcaccctgctcaaggtcatcattctcggcgatagtggggttgggaagacttccttgatgaaccaatatgtgaacaagaagttcagcaatcagcacaaggctacgatcggcgcggatttcctaaccaaggaggtgcagtttgaggacaggctcttaactgtgtaaatatgggacactggtggccaggaaagggtttagagtttctggctttgctatctaactgagtagcatattggtgtgtcctatttctatgatgtttaatttctttttgaattcatttgactacgttgagataacttggggagtatgagttttt

SEQ ID NO: 29909 - DNA, 351 bp, Zea mays
  Clone ID: LIB3180-053-P2-M1-A8
caagagttcatggatgaagtttttgcccagagcaagaagttctttgaccttcctcatagtgagaaaatgaagcttctccgagacgagaagaatagagggtacacacccatgctagatgaaattcttgatcctgaaaatcaagtgaatggtgactacaaggaaggatattatattggagttgaggtacctgcagatgatccaaaagcaaacaggccattttatggtccaaatcagtggccttctaaagaagtattaccaaaatggagagaagtgatggagcaatatcacagggaggcgttgagagtagcaaaatcagtcgcaaggatcatcgctctcgctctagatctagat

SEQ ID NO: 29910 - DNA, 395 bp, Zea mays
  Clone ID: LIB3180-053-P2-M1-A9
tcgtgcgagctgaaggatggcgagctggactcgaacaggctgctccgttgcatttcttataaggagaacttgaagctctacggcaacgggatgaatacagtgtccacacccatcctcaactaaaatttcgatactaacaatcaagggaatggtgactgccaggacggatattatgtttgcgtcgtggtacctgcagatgatgcacaaacaaacaggccattctatggtccaaatcagcggtcttctaaagaagtattaccaaaatggagagaagtgatggagcaatatcacatggaggcgttgacagtagcaaaataagtcgcaaggatcatcgctcttgctctagatctagatgtggacttgttcgatagacctgaaatgcttggcgagtcaat

SEQ ID NO: 29911 - DNA, 211 bp, Zea mays
  unsure at all n locations
  Clone ID: LIB3180-053-P2-M1-B1
ttgctttatctactccagagcgcanaagaacccgatcgacaccatgagggtgtggcgggttgccctcgctctcctggctctcgctgcgagcgccaccttcacgcatacaagcggcggctgcggctgccagccaccgccgccggattcatctaccgccgtcggtgcatctgccaccttcggttcacctgccaccttcggtgcatttcccacc

SEQ ID NO: 29912 - DNA, 254 bp, Zea mays
  Clone ID: LIB3180-053-P2-M1-B10
ttctagatcgcgagcggtcgccctttttttttttttttggctgcggtgcagattgtccaggtccagttgaacgcgcgccacacaggacattagactgcagtaagttcggttgtatcggtgtccagcaaatagaaaccgaagccgagccgatcttttcggttcgtaagaaaggaaaaccgacaccgaatcgaaaaaccgaaaaaaccttgattccagttcggctcggttttcggatgaaatgtgcctacccctat

SEQ ID NO: 29913 - DNA, 277 bp, Zea mays
  Clone ID: LIB3180-053-P2-M1-B11
tttgcgtttttcactccccctttcgttttcggcccagggctcaagcccgccggagaggagtacaggacccaaaccccaactccacaatgaggccgtcgctgatgagatccaccttccagctcctccgccgccggagctactcctccgcatccgggcagcccgagcggaaggtggccatcctcgggtcggcggggtgcatctggcagacgctttctcttttcatgaatctcaacccactggtctccttcctcttgctttacgatatatctggcacccc

SEQ ID NO: 29914 - DNA, 395 bp, Zea mays
  Clone ID: LIB3180-053-P2-M1-B3
ttctgtacaagtcctttgtttctgagtaccctatcgagtcgatcgaagatccatttgatcaggatgactggagcacttatgccaaactcactgatgagattggacagaaagtgcagattgtaggagatgatcttctcgttaccaaccccaccagggtcgccaaggccatcaatgagaagacctgcaatgctctcctcttgaaggtgaaccaaatcgggtctgtgaccgagagtatcgaagctgtcaggatgtccaagcgcgccggatggggagtgatggcaagccacaggagtggcgagacagaggacaccttcattgctgacctctcagttggcctgtctacgggccaaatcaagacgggagctccttgccggtctgagcgcctggccaaatac

SEQ ID NO: 29915 - DNA, 274 bp, Zea mays
  unsure at all n locations
  Clone ID: LIB3180-053-P2-M1-B4
ttggcgctacctacccgcaggcgcactacccggccatggtgcgcctgtcccggcgcctctgggactaggcccatgccgacccctggttcaccatgctcacgtccacacgggacctccacctggtcccgcgggactactcggatctcgtcagctccatgaggaacggtggagccacctacatgttcgtcagacatgagtcatggacttggncaagaacggtgctgctgagggatcgcgactagtggacgctcatgcaacacctgctggtctgcca

SEQ ID NO: 29916 - DNA, 257 bp, Zea mays
  unsure at all n locations
  Clone ID: LIB3180-053-P2-M1-B5
tgtccgtcgccggcgccaagcccctgcccggcgccacctncacgtgcgtctgcttccgggccacccaccagcccgcgtgcctgctctcctcgcccgcgcccgggtctctgcgccgccgggacgtcgccgccatggtctccgcgccgccggccgtcggcaccgccatgccgtcgctcgacttcgacacctccgtcttcaacaaggagaaggtctccctcgccggccacgacgaggacatcgtgcgcggcgggaggaac

SEQ ID NO: 29917 - DNA, 142 bp, Zea mays
  unsure at all n locations
  Clone ID: LIB3180-053-P2-M1-B7
attgctaaaacacannctgcgatcctcgaaggctccttcgagcatgggggatggggttctactgcggcaagtactcagatgatctcatcaagaatgctgcctacataatacaccccttgcaagggtatcctttctgtcttat

SEQ ID NO: 29918 - DNA, 177 bp, Zea mays
  unsure at all n locations
  Clone ID: LIB3180-053-P2-M1-B8
ttcgaatgctctaacgcctcgcgacagcgtgctctctcgcgcgatgcgcttgcggggaggcaacacaaaatacaanacaaaacaccttatctatcacacgctcaattcttaaataaatatactcataaaatatattaaatatcaaatattatacaaataaacataaatactaaaata

SEQ ID NO: 29919 - DNA, 180 bp, Zea mays
  unsure at all n locations
  Clone ID: LIB3180-053-P2-M1-B9
tctnctgtctccgcaccccaatctaatcgacacctggcctagatgggccggagaggtggtcgtctgtggcaactggaaatgcaatggaaccacagatcaggtcgagaagattgtcaaaaccctgaatgaaggacaggttcccccttcagatgttgtggaggtcgctgtcagtccttctta

SEQ ID NO: 29920 - DNA, 458 bp, Zea mays
  Clone ID: LIB3180-053-P2-M1-C1
tggctttatataaagtggaatccagtagcaacaatagagcaacaatggcgacgcaagatattttccctccttatgctccttgctctttctgcatgtgttgctaacgcgacaattttccctcaatgctcacaagctcctatagcttcccttcttcccccataccttccatcaatgatagcttcagtatgtgaaaacccagctcttcaaccctataggcttcaacaagcaatcgcagcaagcaacatacctttatcacccttgtttcaacaatcgccagccctatctttggtgcagtcattggtacaaaccatcagggcacagcagctgcagcaactcgtgctacctgtgatcaaccaagtagctttggcaaacctttctccctactctcagcaacaacaatttcttccattcaaccaactgtctacattgaaccgtgctgcttaattgcagcaacaact

SEQ ID NO: 29921 - DNA, 344 bp, Zea mays
  Clone ID: LIB3180-053-P2-M1-C11
tgcgtcagcctagcaattagctcatggactgcatattggagaactgggcaccgtgaatgtgctgatcgttgcccttgctctcctggcgctcgctgcgagcgccgcctccagtacaagcggcggctgtgtctgccagacaccaccgtttcatctaccgtctccgttctatatgccgactccgttctatctgccgtcgcatcagcagccgcagccatggcaataccccactcaaccaccgcagctaagcccttgccagcagttcggatcctgcgtcgtctgtatgctctgcagtccgatcctgggccaatgacctcttagttcctgaggcaccatttgtttttccg

SEQ ID NO: 29922 - DNA, 317 bp, Zea mays
  Clone ID: LIB3180-053-P2-M1-C12
tcttgccgtctccgggcacggcctcgtcaatcctttgctcctgctccgccggagccgctgccatggactccacgccggcgcccgaggcggctcccggagcctcctcttccgccaccgccgctgccgaggatctggcggggggcgtggcggcgatgaccctggatgagcggttcgctctgctgcgggggatcggggaggagtgcattcaggaggacgagcttaagctcctgctcgagaacaagctcgttcccatctgcttccacggcttctagcccttctgacgcatgcacatttcccagggcattgtgaataccttc

SEQ ID NO: 29923 - DNA, 184 bp, Zea mays
  Clone ID: LIB3180-053-P2-M1-C3
atgactctttttctccctgcaaacccagcaggcgaccacctctcgttgttctgggcggggcaggacaaaaggggagagagaggttaggcgcgttttccgcccgatctgctctgccccgacgcagctgataccacctttttagtctttgtagcaagaatgtttcctgcttttttattaccttaaa

SEQ ID NO: 29924 - DNA, 291 bp, Zea mays
  unsure at all n locations
  Clone ID: LIB3180-053-P2-M1-C4
tcngtaatgattcaggtattccttggccaaagtggtggtcgcgatgtggaaggaaatgagttgcctcgccttgtttatgtctcgagagaaaagaggccaggttataaccatcacaagaaggctggtgccatgaatgcactggtacgtgtctctgctgtcttatcaaatgctccatacctattgaacttggactgtgatcactacataaacaatagcaaggccataaaagaggctatgtgtttcatgatggatcctttgggggggaagaaagtgtgctatgtacagttccct

SEQ ID NO: 29925 - DNA, 228 bp, Zea mays
  Clone ID: LIB3180-053-P2-M1-C5
tgactattttcttagatcgcgagccgccgcccttgtttttttctcgaggaggagggacgggaatttcctccccttgattatgcctcgagagaaaagaggccattttataaccatcacaagaaggctgttgccatgaaagcactgatacatatctcctctgtcttatcaaatgctccatacctattgaacttatactgtgatcactacattaacaatttcaagtccata

SEQ ID NO: 29926 - DNA, 348 bp, Zea mays
  Clone ID: LIB3180-053-P2-M1-C6
ttttatatgccccgctcgtattcaagacgctgatacggtctctctgctcagggggccgggccctacaccgcggcgacaggtataaaagacatttcccgacccgtgccctactcgtcgtcgtcgccacaccgtcaccgtcacctactcaacaccaggcgctccagcagaacagcacttggagctcgcctgcccgacggcccaccatgatcatccccaagaagaaccgcaatgagatctgcaagtacctctttaaggagggcgtgctgtatgccaagaaggactacaacctggcgaagcacccacagattgatgtgcccaacctccaagtgatcaagcttatgcagagct

SEQ ID NO: 29927 - DNA, 201 bp, Zea mays
  Clone ID: LIB3180-053-P2-M1-C7
ttccctgttcaagtgcgatttctatctaggagacgcgctttattttgaagggggggcgatctaatacattaaggagatatgcagtttgcacttgcatagtacactaactcatgatctcaccagataagatcttgttagggtgataggaataacagttaggataaatcaataatagaatatctatttctctttaatattctt

SEQ ID NO: 29928 - DNA, 454 bp, Zea mays
  Clone ID: LIB3180-053-P2-M1-C8
tttcataaaagccgcctctcgccgccgactgcaaaccctcgtttttctctctgctgcgctgcgccgtccttcacctccgccgccgaatccgagactctgatctcgggttcaccgcagcgcacagagcacccctgactcccggcccgatccgcgctctcctctccgacgcttcagtcatggcaggaatggcacccgagggttctcagtttgatgctaagcactatgattctaaaatgcaggagctgctgagcactggtgagactgaggagttcttcacttcatatgatgaagtttttgaaagttttgatgacatgggccttcaagagaatcttctgagaggcatttatgcatatggttttgagaaaccatctgcaattcagcagagaggaattgttcccttctgcaaggggcttgatgtcattcagcaagcacaatctggtacaggaaagacagg

SEQ ID NO: 29929 - DNA, 273 bp, Zea mays
  Clone ID: LIB3180-053-P2-M1-C9
ttcgtttggttccccttttaccaaagcacatatgtgacgatgtgttgatggactacgacgcgcttaaggctgtgcagactggattgggtaccgcagctagtatcgtgatggacaaatctacggacgtagtgcacgcgagtgtcagggtgtgctacttgcacaaacacgagagcttgtagcagtgcacgcactgccccgagggcacgctcaggctgtggctgataatagagaggctcaaggcaggagctgctaagctagagggagactgatgcg

SEQ ID NO: 29930 - DNA, 93 bp, Zea mays
  Clone ID: LIB3180-053-P2-M1-D10
attcgtctgtccttcctacccacctcctgccgggcgagcgtgctcccgcatgccgcgcgggctgactgcgcgacggcggacgacgtgtgtctg

SEQ ID NO: 29931 - DNA, 231 bp, Zea mays
  unsure at all n locations
  Clone ID: LIB3180-053-P2-M1-D11
tttcgnctgnaactacaagggcacgacgatgatgttggatgacataatccaaaggcttggtggtctccaatcatccctgagaaaggcagaggagtatctactgagtgttcctcaagacactccctactcggagttcaaccataggttccaagagcttggcttggagaagggttggggtgacactgcgaagcttgtactctatacactccacttgcttctcgacctttttga

SEQ ID NO: 29932 - DNA, 156 bp, Zea mays
  Clone ID: LIB3180-053-P2-M1-D12
tgttgagtgctatcattccatatcaatgtacttcctcttctagaaaaaaaatcgttttcaccaacaaaatcttaggttaacaattgcacgaatgcactgcaaacatagcaagcaaccattcttcttaatcatctaacgccctccggttcaaggtcg

SEQ ID NO: 29933 - DNA, 118 bp, Zea mays
  Clone ID: LIB3180-053-P2-M1-D2
tgtggttctcgcagggtcctgcccaagcccagaacctgatatattcactgtgtgaagccaaatcatatattgttgtgaagattggactccggaatggatccaaatttttttgaggaat

SEQ ID NO: 29934 - DNA, 406 bp, Zea mays
  Clone ID: LIB3180-053-P2-M1-D3
tttgagtgctgaaaaacgaagagagttctactcaaagctcgaggagaagattgatgcacaggaactagagaaaagcaacttgcaggcaaaatcaaaggaaactgaagaagctgaactcaaaatgctgagaaagagtttaaatttcaaggcaacaccaatgcccagcttttataaagaaccacctccccccaaggttgagttgaagaagatacctacaacaagagctaggtcaccaaagcttggtcgctccaagaacacatcctcaggagggacagaagggaatccaaatcctccagctcgttcagctcgactgagtcttggatgaaagggtctcccaaaatggtgtcaagaaagcacctgttgcaaatgcagtgaagaaaccccaacggaaatctctacctaaact

SEQ ID NO: 29935 - DNA, 186 bp, Zea mays
  Clone ID: LIB3180-053-P2-M1-D5
tgttattgtaccgggagcgcacatcctcatggcatccaaaatgttggcatggtgtgcgctcctaactctttgtgcaacctacactagtgctacccatatcccagggcacttgtcaccactactgatgccattggctaccatgaacccaaggatgcagtactgcatgaagcaacatggggttgccaa

SEQ ID NO: 29936 - DNA, 365 bp, Zea mays
  Clone ID: LIB3180-053-P2-M1-D6
tgcttttctcgccggtgcgcgagcttttctagggtttccgctgccccagccgccaaccccgctcacctctcgtcagcggcgatggcgtcggcgtcggtgtcggccccggtggcaggggcaggggccgggggcgggaaggacgaggagctcaccgatctggtgcggcgcctcatggacgccctcgctcgctacgctgatcgcctgcccttcgaccttgatcgccagaaacttcgttcacttactacacttgctgcgatctcgatcacacttctgtttgcctggaaaatgttgagagctcctcaagagcaaccttggaggcctcgtaggagagctgccccattatcttgcaacaccagcacttgatc

SEQ ID NO: 29937 - DNA, 401 bp, Zea mays
  Clone ID: LIB3180-053-P2-M1-D7
tttcaagtgatttgtatcactcgtcatgccatccagtaaacatgggagtgtgctcatcctacttgcagcattcgactcccttgaaagatagcaaagactgcagctgggctccaatttttgttaggcaatcaaacttcaaactgcctgctgatcctactgtgcccattataatgattggccctgggactggtctggcacctttcaggggcttcttacaggaacgactagctttaaaacaggcagaggtggaactgggccatgctgtcctcttctttgggtgcagaaatcggaagatggacttcatatatgaggatgagctcaataattttggtgatgccgggtgccctttctgagttgatcgtagccttttttcgtgagggtcctacaaaagagtttgttca

SEQ ID NO: 29938 - DNA, 189 bp, Zea mays
  Clone ID: LIB3180-053-P2-M1-D8
tgctgttgtgacatgaagttcttcgccaccccgccggtgcacggctcgctggggaacgaggtggtgcacccggtctacctgtgcttcaagcttcttgactgtttgagttcttgattttgactgcctagtgtcttttactttttattttatttttttattaattttatttgtatttatattattttttta

SEQ ID NO: 29939 - DNA, 363 bp, Zea mays
  Clone ID: LIB3180-053-P2-M1-E1
tttgacttacaagcaacatagaaagtggaatacagtagcaacaatagagcaacaatggcggccaagatattttccatccttatgctccttgctctttctgcatgtgttgctaacgcgaccatttttcctcaatactcacaagctcctatagctgcccttcttcccccataccttccatcaatgaccgcttcagtatgtgaaaacccagcccttcaaccctacaggctccaacaagcaatcgcaacaagcaacttacctttatcacccctgttctttcaacaatcgccagccctatctttggtgcagtcattggtacaaaccatcagggcacaacagctgcagcaactcgtgctaccagtgatc

SEQ ID NO: 29940 - DNA, 101 bp, Zea mays
  Clone ID: LIB3180-053-P2-M1-E10
tgggagagagaagtttgttacaaggattcaactagtgttccgcatcctcaagggcattgtgttccttgtgctcattggtttgcttgtccttttatttgttg

SEQ ID NO: 29941 - DNA, 216 bp, Zea mays
  unsure at all n locations
  Clone ID: LIB3180-053-P2-M1-E12
tcgtagttctagatcgcgagcggccgccctgtttttttttttatgggggggggggttttttattttttttntttttataaagcttgcgcgcttaagcagtgatgataagagcctatccacgaaatgatgaaattatacatagcttcggaattttgaatatgaacattatccgaaatcaatgccatctaaatataaaattttatattttaacttaaa

SEQ ID NO: 29942 - DNA, 285 bp, Zea mays
  unsure at all n locations
  Clone ID: LIB3180-053-P2-M1-E3
natgcctttatcggcggtcgctccccgcttaaaccctgaagcccgcacaccggcgaggcggacggaccagagtcggcgagcccccaggaggcgccgactccgcctccggctctgaccggtctttagaccccccctgccccaggcgacgacgaaaccagcagcgctgcgcagcgccgaccactccgggaacctcacgatccaggggagatgctggtcgccgtcgtcgccttgccgttgcagccgtgaaccggatttcccagggcggagggacttgggctcagaatc

SEQ ID NO: 29943 - DNA, 358 bp, Zea mays
  Clone ID: LIB3180-053-P2-M1-E4
tttatagttcgtaggatttttgcgacgtacaggcgtcctccttccgcttccgcacggaaggggaagatactgtcggaatcggcatcttcccctccagtccctcgctctaccaccagcagcgaccgctgtcggaggagggcgtggttggggggaagtgccgcatcgggaggagataaagcgttctccaatcttccaatcccctacggctgccacttgttctagtatctagttagtcaggaaccttaaaataggttaaataaatacatgggaggtccaagaagattctaggccttccggagcccttgggtggcctatacagggtacagtttgggggccggtcaatattcagtgatgacca

SEQ ID NO: 29944 - DNA, 111 bp, Zea mays
  Clone ID: LIB3180-053-P2-M1-E5
tggttttccagaccattagcttaatctactgcagagcgcataagatcccgagcgacagcataagatactttcttaatctacatctttccctccagtccttttctctaccac

SEQ ID NO: 29945 - DNA, 56 bp, Zea mays
  unsure at all n locations
  Clone ID: LIB3180-053-P2-M1-E6
ttttctttttataaaaangacagaaaagaaacgttataggtcgatgaatgggcagg

SEQ ID NO: 29946 - DNA, 105 bp, Zea mays
  unsure at all n locations
  Clone ID: LIB3180-053-P2-M1-E8
tnatagcgttgtcgcgccgaggaacgggaagcggggcagggacacaacatggcgggcgacggtatagcccgcgatcgcgagcttgctgcgcgaacagaggaacgc

SEQ ID NO: 29947 - DNA, 233 bp, Zea mays
  unsure at all n locations
  Clone ID: LIB3180-053-P2-M1-E9
atcgtcgcgcttcaaggccttttttttttgagataacaaggaggagaggagggggtggctgtcacgatcacgtgggtgaaggcgaggcanatcttcgacagccgcggcaaccccaccgtcgaggtggacgtgggccttagcgactgcagctacgcgaggggggccgtacccagcgtctcattcactggaatatatgaggccttggaattgagggatgcaggatctttttttgt

SEQ ID NO: 29948 - DNA, 119 bp, Zea mays
  unsure at all n locations
  Clone ID: LIB3180-053-P2-M1-F10
tctaatancaaaccctagccccaccgcgcgaatgggcgaagtgctagagcgggccggcgactccccacacgcacgccgaaagccgccacctcccccggatagcccggaggaccgcacgc

SEQ ID NO: 29949 - DNA, 452 bp, Zea mays
  unsure at all n locations
  Clone ID: LIB3180-053-P2-M1-F11
gacagcgcctgtagccctgcagggcatgcgcgacgcacnagnnngcgaaggcattannacgcctctnngcccgttacccgataaaactttggtgtgaccaccgnngcgatccggcgccgtgagggtcaactcatgagttcagtcaggcacgcgcgtganttgctgctgngtctgacctcttgatgaggttcgtgtctcgtacatactggctgtannatcatgtgctccttcggggctcaattgtgttcttctgttggagtgagtccatgtacgaaaggatgaatcttgattgccctgccttccgcttcgctgggttgaacaacttgaacctgtgatgttcagcttgactggggacgtaaagaagaacctggcgctctcttgtgtgcatatctttattgaggatgattgttgacactgtgtgtctaagcttttgcacttttcctatttgtttt

SEQ ID NO: 29950 - DNA, 356 bp, Zea mays
  Clone ID: LIB3180-053-P2-M1-F12
tttcgtttggttttgctgctctccgaccccgagctccgaaggccgcagcatcaggcgcggcccccctcgcgtgtgaccgagatggcgctgccgaatcaggggaccgttgattaccccagcttcaagctcgtcatcgtcggcgatggtggaactggtaaaactacatttgtgaagaggcatctcactggagagtttgagaagaaatatgaaccaaccattggtgcggaagttcatcacgtgtatttcaccactaactgtggtaagattaggttctactgctgggataccggtggtcaagagtagttaggtgggcatatggttggattctatatgcatggccagtgtgcgatctttat

SEQ ID NO: 29951 - DNA, 438 bp, Zea mays
  unsure at all n locations
  Clone ID: LIB3180-053-P2-M1-F4
tcttaactcgccgtctgcctncngcgcctccatttcggcctctgtcccttgcgggttgagatctcacctccaaccatgggtaaagagaagtcccacatcaacattgtggttattggccacgttgactctggcaagtcgaccaccacaggacacctgatctacaagcttggaggcattgacaagcgtgtgatcgagaggtttgagaaggaggctgctgaaatgaacaagcggtccttcaagtacgcatgggtgctcgacaagctcaaggctgagcgtgagagaggtatcaccattgatatcgctctgtggaagtttgagaccaccaagtactactgcacggtcattgatgcccctggacaccgtgacttcatcaagaacatgatcactggtacctcccaagctgactgtgctgtccctatcattgactccaccactggt

SEQ ID NO: 29952 - DNA, 83 bp, Zea mays
  Clone ID: LIB3180-053-P2-M1-F5
ttcggacttccgccgccgcagcgccctcctctcggaggggccgaccgacaagggggaagggcaacaactacaggcacagacaa

SEQ ID NO: 29953 - DNA, 126 bp, Zea mays
  Clone ID: LIB3180-053-P2-M1-F9
tgcgctcgttcaactcgtgctcagctcgtccgtcccttccttcggcaaggtcatactgatcttctgatccagagccgggtgttggcacagatcaggcggccgccatggcggatcagttcgcggatt

SEQ ID NO: 29954 - DNA, 113 bp, Zea mays
  unsure at all n locations
  Clone ID: LIB3180-053-P2-M1-G10
ttgcgtttgcacaaggcaanaaagccagaagcgacggaggccaacaggaagggagccgcgcaaaacaagcgcgaagaacacgagaaggggaagaaggaccgaatcccaaggaa

SEQ ID NO: 29955 - DNA, 204 bp, Zea mays
  Clone ID: LIB3180-053-P2-M1-G11
tggagtgttactaacaatcctgggatgaatcgtggctatgccttgcttgagtggtctactcgacctgaggcaatggatgctttcaggacattacaaaagagggatgtagtatttggagttgatcgtagcgcaaaggttttctttgctgattcataccctcaagtcgttgatgaattaatggcacatgtcataaccgaatttttt

SEQ ID NO: 29956 - DNA, 86 bp, Zea mays
  Clone ID: LIB3180-053-P2-M1-G12
ttgcttattctacttctacttcagaatcggcgccggtcccggcgcctcggatggggaactaccgcaggaggtcgcggctgcaggat

SEQ ID NO: 29957 - DNA, 412 bp, Zea mays
  Clone ID: LIB3180-053-P2-M1-G2
tttcttatgattgtatctgaaaggcttggcagcaccattagtttctcagaatggggaggtattgagatcgaggagaactgggacaaggttaagactatctttcttcccacagagaagcaaatgacacctgacgcatgtgctccattgattgccaccctgccattggaggtccgcacaaagataggtggtttcattagagctgtattttctgttttccaagacttggatttctcatttcttgagatgaacccattcaccttggtaaatggtgaaccggattctctggatatgagaggagaacttgatgacacaactgcttttaaaaacttcaataagtggggtcacattgtgtttcccctaccatttggaagagttctcagttccttcgaaagtttattcatgaactggatag

SEQ ID NO: 29958 - DNA, 238 bp, Zea mays
  Clone ID: LIB3180-053-P2-M1-G3
tgtgctttacaggatcctctgcgccaccggagccgtgtgaccgcccgtgccgccggcgatcccgatccgccgacccgtcccagccccgctcgcagccatgtcgccgtcggagccgacgcgggaggagagcgtgtacatggccaagcttgcggagcaggcggagcggtacgaggagatggtcgagttcatggagcgcgtcgcgcgctacgccgggggcgcctgctgtagggaggatctt

SEQ ID NO: 29959 - DNA, 73 bp, Zea mays
  Clone ID: LIB3180-053-P2-M1-G4
atgctttttgtttaagcaaccaccacagaggggccggcaggacggcaacaggggggagggaagaacaccaggg

SEQ ID NO: 29960 - DNA, 217 bp, Zea mays
  Clone ID: LIB3180-053-P2-M1-G6
tgcgttcgagctttatctactccagagcgcagaagaacccgatcgacaccatgagggtgttgctcgttgccctcgctctcctggctctcgctgcgagcgccacctccacgcatacaagcggcggctgcggctgtcagccaccgccgccggttcatctaccgccgtcggtgcatctgttaccttcggttcacctgccacctttgttgcattttccacc

SEQ ID NO: 29961 - DNA, 378 bp, Zea mays
  Clone ID: LIB3180-053-P2-M1-G7
tggtcctcttcgcctgcctgcctacaagtcgcctcccctccccgtgcctccctcgggcctcgcttctcgcgctcttcctctcctgcctccaggctccaacaacccgggagggcgccgtccgcccccgcctccgggagcgatgatgatcgcgcgacgcctgctccgacccaatgcccccgcccaggcaagcagcttattgaagcatgtaactggcaccgcaagtttgcaaggctatgcggatagcttgttggatggtacagtcagacattttggttcaacaccgtctgcccagcctgaagaaaatgggttcaagggccacggcatgctggcgccttttacagctggctggcagagcaatgatttgcaccctttgatcat

SEQ ID NO: 29962 - DNA, 241 bp, Zea mays
  Clone ID: LIB3180-053-P2-M1-H1
tttcgttttcccaggaccagaacagccgcgtcgaggcggccctcgagaccccgcggccgggacccatcccaccaacactcccacccccaccgccacctgggctcccgtatccgcacccgaagggcagactccgcggcgactctgagccgcagggcgcgaggcggcggccgcggttcctgagcctgcacgggttccccaccaacggcgagatcatgcgcaagcaggtgcttgggaagtggcc

SEQ ID NO: 29963 - DNA, 290 bp, Zea mays
  Clone ID: LIB3180-053-P2-M1-H11
ttttccattcgttcgggtcttcagaccattagctttatctactccagagcgcgagaagaacccgatcgacaccatgagggtgttgctcgttgccctcgctctcctggctctcgctgcgagcgccaccttcacgcatacaagcggcggctgcggctgccagccaccgtcgccggttcatctaccgccgccggtgcatttgccaccttcggttcacctgccaccttcggtgcatcttccaccgccggtccacctgccgccgccgggccacctgccaccgtcggtccatgtgt

SEQ ID NO: 29964 - DNA, 136 bp, Zea mays
  unsure at all n locations
  Clone ID: LIB3180-053-P2-M1-H3
aaataactttttgcgccnccatancagcccagggggcttataaacccgagcggcagcacgaccatgtttaaagagaacctccatatccacattctagctattagcaccacctacactcatacaatcggcacctata

SEQ ID NO: 29965 - DNA, 408 bp, Zea mays
  Clone ID: LIB3180-053-P2-M1-H4
tctgatcttcagatggtgaaaattggtctccgtgtccttacaaggcctatgccagagaggctaccacatatctacagaactctgggagagaacttcaatgagagagttttgccttcaatcatccatgaaacactgaaagctgttgttgctcaatataatgctagtcagctgatcacacagagagagactgtgagtagggagattaggaagatactgactgagagggctagattcttcaacattgctcttgatgacgtctccatcacaagcctgagctttgggaaggagtttactcatgccattgaagcgaagcaggttgctgcacaggaagctgagcgtgctaagttcattgtcgagaaagctgaacaagataagaagaggtgcaattatcagggctcaaggagaggc

SEQ ID NO: 29966 - DNA, 378 bp, Zea mays
  Clone ID: LIB3180-053-P2-M1-H5
gggcgcctttgcgttgtagcaacatagaaaggggaatccagtaggaacaatagagcaacaggggagaccaagatattttccctccttatgctccttgctctttctacatgtgttgctaacgcgacaattttccctcaatgctcacaagctcctatagcttccctttttcccccataccttccatcaattatagcttcagtatgtgaaaacccagctcttcaaccatataggcttcaacaagcaatcgcagcaagcaacatacctttatcgcccttggtgtgtcaacaatcgccagccctatctttggtgcagtcattggtacaaaccatcagggcacaaccagctgcagcaactcgtgctacctgtgatcaaccagta

SEQ ID NO: 29967 - DNA, 208 bp, Zea mays
  Clone ID: LIB3180-053-P2-M1-H6
gtgcgatgctgatagaaatgctttctcgtggtttcaaggatcagatttatgacatcttccagcttctgccatccaagattcaggttggagtcttctctgctaccatgccacctgaggcccttgagattacccgcaagttcatgaacaaaccagtgagaattcttgtgaagagagatgagctgacccttgagggtattaagcagttcta

SEQ ID NO: 29968 - DNA, 316 bp, Zea mays
  Clone ID: LIB3180-053-P2-M1-H7
tttgcgttcccctcctgcacgcaacctcatctcgtcctccagatccaggatggccgtcctccttgagaccttgcctccccgagtgctctcggtgagctactttgtttcgatttatcaggaaatccgtttgcttcatgttgtgcaggctcatatctgattgctggattcggcaaacccgcgttggatcctgtatcggttagtccttgcctgcaaggttcttgttgttttgttttggtggtcgagcatcgcatgttctgcttctggatccagatctggagaaatcgcgaagtcgtcgtcggtcggttcggagcggatc

SEQ ID NO: 29969 - DNA, 189 bp, Zea mays
  Clone ID: LIB3180-053-P2-M1-H9
ttcacaattgttcacttgttcttggttttggtcttacagaccgtcaccggcaggcagcagccttggcgggttggtcttgtgtcattggttcctgggtgccatcaatggaggtggggaacaggtacgttgccaccccgcaccacattcagggcgccccgactgaggccgattttgaggtgaaagaagaga

SEQ ID NO: 29970 - DNA, 388 bp, Zea mays
  Clone ID: LIB3180-054-P2-M1-A10
cgccttcttccactactcttcaccctcccctcctccccatcgcgaactcacaagagaaccaagtagacgagggagaaggagatggcgaagaagaaggagaaggcggtgaacgtgtcgggcaagccgcggcactcgaacgacgtcaaccgccccaatgacaagaagggcgcgggcggcggcgccggtggcgggagccggtccgcggctaccgtgcggcggctcaagatgtacaagacgcggcccaagagggaccgctccgggaaggtgctcaggaacgattttcagtctaaagagctccccaacacccgcatcgagcccgaccgccggtggttcggcaatacttgcgttgtgggccagccacagcttgaaatgttccgggaggaactcc

SEQ ID NO: 29971 - DNA, 165 bp, Zea mays
  Clone ID: LIB3180-054-P2-M1-A11
tctgcgtacacggtatccctcttcctgtcagtagtagagtgagagtgaggcagcaaaaccaagacaaggagaaataaggagatggccaacaagaaggagaaggcggtgaacttgtcgggcaagccacggaactcgaactacttcaaccgccccaatgacaagaag

SEQ ID NO: 29972 - DNA, 294 bp, Zea mays
  Clone ID: LIB3180-054-P2-M1-A12
gcgacccgcagcaaaaggaagcttggctcggttcccctcctgcggcctattggcttctggcctcgtataaaaaaggcgaggacgcgctccaccgccagaatcatcgtcaccccggagcctctccttcccggtctcctccgcccgttgccttcgtcccctccatctccggctgcgacgccggcgagcccgacaccgcgaatcggatccgccgacaaggcgagagggaagagatggtgctcacgttcaccaagctgttcagccggctgttcttcaagaaggagaagcggattctct

SEQ ID NO: 29973 - DNA, 232 bp, Zea mays
  Clone ID: LIB3180-054-P2-M1-A2
gtcttaggtgctttatgctttaaaatgttgtttcctttggtgtacctaagaaaatacttcttaatcatggtgtgcttagacattttgctttatatgcatgatcttgtcgtttttcaattggtatatgtgttgcaatgatcatcatgtgtgaagtgtgcctacgttgcttttgaaatgttatatatcttgaggcatgcattgtttccactagtcataagttgtattatgtcat

SEQ ID NO: 29974 - DNA, 302 bp, Zea mays
  Clone ID: LIB3180-054-P2-M1-A3
ggaagaaggattacaaggacggcaggttctcgcaggtcgtctccaacgcccttgatatgaagctcagggacgaccttgagaggctcaagaagatcaggaaccaccgtggtctgcgtcactactggggcctccgcgtccgtggccagcacaccaagactactggtaggcgtggaaagaccgttggtgtctccaagaagcgatgagctctatatcaccctgagaaatcttggccgcactaccgtgttggtttgttttttaactgtttatgatgtaggtttgtttttttatttcaatttttatta

SEQ ID NO: 29975 - DNA, 352 bp, Zea mays
  Clone ID: LIB3180-054-P2-M1-A4
tcttcttccactactcttcaccctccccttcttcccatcgcgaactcacaagagaaccaagtagacgagggagaaggagatggcgaagaagaaggagaaggcggtgaacgtgtcgggcaagccgcggcactcgaacgacgtcaaccggcccaatgacaagaagggcgcgggcggcggcgccggttgcgggagccggtccgcggctaccgtgcggcggctcaagatgtacaagacgccgcccaagagggaccgctccgggaaggtgctcaagaacgattttcagtctaaagagctccccaacacccgcatcgagcccgaccggcggtggttcggcaatactttggttgtgggc

SEQ ID NO: 29976 - DNA, 230 bp, Zea mays
  Clone ID: LIB3180-054-P2-M1-A5
tctttgttcgtccagcaccagctttcctccgcaccccgatccggacagactggcgggaaccctaaccctagcgcgccatggcgggatacacccaggccgcatccagggacgtctctgccaagcctggacactctaacgacgtcaactcggccaatgacaagaagggcgcgggcgtcggctccgttgtgcggtagccggatcctggttacctatctgctgtttatgatgta

SEQ ID NO: 29977 - DNA, 139 bp, Zea mays
  Clone ID: LIB3180-054-P2-M1-A7
tcgctccgctgggccaccagctttgaccgccggcttccttgccctccggtactgctcctcctcaccccactcccccgcaggagcggcggcggcggccgctaggtcccaatctttcttttggtgcgtcagtccatcctgc

SEQ ID NO: 29978 - DNA, 210 bp, Zea mays
  Clone ID: LIB3180-054-P2-M1-A8
caaccatcaagatcttcagggaccaggggaagaacattcaggaatacaagggccctagggaggctgatggcattgtggattacttgaagaagcaggttggccctgcgtccaaggagatcaagtcaccagaagatgcgacggcccttatcgatgacaagaagatctacattgttggtatctttcgtgaattcagcggcacccaatttacaa

SEQ ID NO: 29979 - DNA, 220 bp, Zea mays
  Clone ID: LIB3180-054-P2-M1-A9
ctccgctccggctgcgctctgcctggctttcctgctacctgctctggcgcgagcgtgctaggtacggcggccgatctggcggctcattcttttgtttgtgttcttttccatttgttttttcttttttgttttggttctgcctttcgtttcttttcttttttttttttcttttttttttttttcttttttattttttctttcgttattccttttttatttt

SEQ ID NO: 29980 - DNA, 188 bp, Zea mays
  Clone ID: LIB3180-054-P2-M1-B1
gggggggacccaggccaactccgcgcacggttgccctcttatgatcatggacatcaccacgggcgggggagacttcccttgaaacgtacccggccttattgtcccttttcctacctcctgagtttggcttttctccaaccttccctcgtttggttgtatgcggtactgaaaacgcacacaattttttt

SEQ ID NO: 29981 - DNA, 354 bp, Zea mays
  Clone ID: LIB3180-054-P2-M1-B10
tctttctgaattgaccatgatggacaaagatgatccagaaggtgatctatggaggcccaccactactcgtacgacgctcatgtcctgatagctcttcaccgtcttctattttctcatcaacgattcctatgatactttcatattgttccattctcgtcagtactatattcagccaaaagaataaaataactcagcagacatttatattaacttcagctgaaagaaacacaaatgtgtagttttgcagcattatcaattgtgcttgagaatttgaatcacttattgatgggtacattgttattagagccttactgctaaaggatataaagtcttttccattgggatcgtcaacca

SEQ ID NO: 29982 - DNA, 356 bp, Zea mays
  Clone ID: LIB3180-054-P2-M1-B11
ttcagcgaaccagagaggagagcgggagatgaagggcgtcgggggcggcgcggcctccccgggggactatgtctacttcaaatctgtcgtcccgctccacaagatctccattgggtcaaaactgtggaggtactatgactttggacccatggttgtgccacctcttgtttgtatcccaggaattgcaggaacggctgatgtatactataaacagattatgtccctttgtatgaagggttatcgagtaatatctattgacgttcctcaagtttggattcaccatgattggattcattcattttaaaaatttttggacttcattattatccattatgttctcatttattgtacttttt

SEQ ID NO: 29983 - DNA, 341 bp, Zea mays
  Clone ID: LIB3180-054-P2-M1-B12
gaaggaagggcgtcattccagggattacctatgcgatagcccccaccattgtcgccctcaccccgctctccatcgaaggacgggcgccattccagggattacctctgcggcagcccccaccattattgccctcatccgctctccgccatcctcacccccacccgcccccgccatcctcctcctacgcgcaagtcttcggtgcccttctcctgcccctgccatccccgcatatttggatccagggttcgctcaggttgcctcacaagggccccaccacgcgcggtcagggagcatggtgggagcttcgctcacgtgcgtggttgctgggagctttgttacca

SEQ ID NO: 29984 - DNA, 297 bp, Zea mays
  Clone ID: LIB3180-054-P2-M1-B2
gcaaacatggctggcaactacgggtatgagtttgctgatcctacgcgcccgcaagtctactactcacaggcagctgcacctccaacattgccacagtatccgcccattgtctctcctgatgctggccaggctgaaaaacattaagcagactgagcattggtgaattcaggtatgcctcaaattctagaggccttgttatccgtctgttacttatcattattgttgctaccgcatgttacatgaatccgcgtcaaagagtgaagatgttgctatttgggcaactgtgccattgctttg

SEQ ID NO: 29985 - DNA, 104 bp, Zea mays
  Clone ID: LIB3180-054-P2-M1-B3
tctgggatgccgcctggtcccagagctggtttttcaatgtgtgtgcacaagaaaagggctgttctttttggtggtgtggtagatatggaagcgtccaaatttcc

SEQ ID NO: 29986 - DNA, 195 bp, Zea mays
  Clone ID: LIB3180-054-P2-M1-B4
tcgccttcacccaagccaaagcccctcggatcggatccggtctcctccgtgtcccattcgccacgcagcggcgccacaggagacggagacggagatgaagctgtccatccagtcgctcgccaggaagctgtccctgccgtccccgaagcggggcggcggcggcatcgtctaggacgggaagaagaagaagaagcg

SEQ ID NO: 29987 - DNA, 379 bp, Zea mays
  Clone ID: LIB3180-054-P2-M1-B5
ttatctattgattcttcagatcatacatcaagctctacaggccaattgactcagatccataaaagatgctgctggcagtatggaaagcgataaggatcaatgcgctggtggtaaaatagaccttaccatgtcccaggagtgcacaggcctagaaggtatgaaccttgatgagagtagcccagacagaatggattcatcacattctgggatagttgttcatgaaaaccagctatctgaacaaaacaatgatgaacctgcggcatataatggggtttacatgattacacaccaatcatgtagtgatatgcagactttagccggaccatcttgtacagaatcacaaccattgaatgatacacaaaaggctgttatttcctac

SEQ ID NO: 29988 - DNA, 312 bp, Zea mays
  Clone ID: LIB3180-054-P2-M1-B6
ggacagttatggtgatatgcctgttcacaatcttctgtggagggagtgtgcaaagtcctcatgtgacgtttccgcatggttggcattgattccttttggtctaggtaccacatcattgttgcttccttctgtgtgatgcttgtcctatgtatatgctttatttttgtacttgagcttaatagtctccggtcttcacttggtagttgtagtttatgttttaggtgagaatgcttgttgaagaactctacattgttaaaaatgaccaatttgttgattattagaaccttgatattaagccagaggccttgatgt

SEQ ID NO: 29989 - DNA, 268 bp, Zea mays
  Clone ID: LIB3180-054-P2-M1-B7
gcaacttgtccgcaccgcctcctaatggagcttcaagttctgatcaacctgaaagatgattgagaagatggaactggtagatttttcgtggcatgagtctaaccaagatgggcttcaaaaggtggtgcaactaaccttggcagatcggttccaagggactcggacaatgggctcaatataaacaagctcaacagcagtttatccgttgcttatatttatttctattgactgtatcgagtgaagaggatagtttttgtattttaatttg

SEQ ID NO: 29990 - DNA, 258 bp, Zea mays
  Clone ID: LIB3180-054-P2-M1-B8
gtgggttggcttctcctccccctccggttcgggttcgggttcgtgaggttctccggggttcggtttcgtgggtgagcggatcgagatggcggcgtcggatgttgagtaccgctgcttcgtcggcggcctcgcctgggccacggacgaccactccctccacaacgccttcagcacctacgtcgaggtcctcgagtccatgatcatcctcgatcgggagacgcaaaggttccgctgtttttgcttcgttaacctttttca

SEQ ID NO: 29991 - DNA, 146 bp, Zea mays
  Clone ID: LIB3180-054-P2-M1-C2
gccgcgacgcggtaggggaaagggtaagggtagggcaaaaccaagagcgaagcccaccgagcccgatcccgagttcgatcccgaactatacaaatccgtcaagtccgaaatcgtggcgggggacgcggaggctttggaggattttt

SEQ ID NO: 29992 - DNA, 171 bp, Zea mays
  Clone ID: LIB3180-054-P2-M1-C3
cttacgcgtcgaagtcaaacccttctcagcagccgtcgtggtcaccgttggagcgcgtattcaaaaccaaatcgtagtgatagcatgcgacatgttcatgtagaccgtaggagaaaaaaccatgactttgaacgggcggcgactggcaaaattcttcgtcgtcgtgtgagg

SEQ ID NO: 29993 - DNA, 85 bp, Zea mays
  Clone ID: LIB3180-054-P2-M1-C7
tggacaccgtgacttcatcaagaacatgatcactggtacctcccaggctgactgtgctgtccttatcattgactccaccactggt

SEQ ID NO: 29994 - DNA, 382 bp, Zea mays
  Clone ID: LIB3180-054-P2-M1-C8
gccgcctgctctctgctgccgtcgccatggggagaaggcctgcgagatgctatcgccagatcaagaacaagccataccccaagtccaggtactgccgtggtgtccctgaccccaagatcaggatctacgatgttggcatgaagagaaagggtgttgatgagttcccctactgtgtgcaccttgtctcttgggagaaggagaatgtctccagtgaggctcttgaggctgcccgtattgcctgcaacaagtacatgaccaagtctgcaggaaagggatgcctccaccttcgggtccgggttcacccctttcatgttctttgtatcaacatgatgctttcttgtgctggggctgataggctccagactggaatgaggggtgcctt

SEQ ID NO: 29995 - DNA, 392 bp, Zea mays
  unsure at all n locations
  Clone ID: LIB3180-054-P2-M1-C9
tagaccttcaactcctaccattgatcgtgggatagcattacataagatgattagacttatcacaatgggtttaggaggagagggctatcttaatttcatgggaaatgagtttggacatcctgaatggatagattttccaagaggtccgcaaagacttccaagtggtaagtttattccagggaataacaacagttatgacaaatgtcgtcgaagatttgacctgagtgatgcanactatcttaggtattatggtatgcaagagttatgatcaggctgtgcaacatcttgagcattaattttaattaattacttctgatcaccagtgtatctctcctgatacatgaggatgttattgcgatttctttttaaagtgtgtatttttttcttttttt

SEQ ID NO: 29996 - DNA, 111 bp, Zea mays
  unsure at all n locations
  Clone ID: LIB3180-054-P2-M1-D1
tgagcttcctccttatgatcctgactggtactacatcagggctgcatccattgcaaggaagatctacctaaggcaaggcatcggtgtgggtggctntcataagatctactg

SEQ ID NO: 29997 - DNA, 294 bp, Zea mays
  unsure at all n locations
  Clone ID: LIB3180-054-P2-M1-D2
tgggagtgtgccaacacgatccatagtgtctggaaatgcgccagtcaatgaagccttgggatcttcaaaagtcagtgctggcatggaaagccagtcacaacaattgagtgcgcctaagcctttagctgcaacaagcttaagtcanactcaatctgatggcattcaagaagagcctaaaattcatgggaagaaacaactattattcgagagtttgcctgcaaccgatctaaaggttagagcgagcggcatgtgattcgggtatgtacattgttgttccaaaatttatgtgttttg

SEQ ID NO: 29998 - DNA, 299 bp, Zea mays
  Clone ID: LIB3180-054-P2-M1-D3
ttctttcacacgccttctcaccggctcacgacgtcgccacctcagatccggcgaccgatcccctcctcctcggcgaggcgtagcccgcagagccgagccggacaacacagccacgaccacgaggcgtcgtcgcggagtagtcggagccgtttctgctgcccccctccttcccgccaagtttgtcaagttacgtccgatgctccagacatagtagaaaaccatgggagaagttagtgatgacaattccaacctgtcctttctaaaaagaatcgcaacaagtgacgtaccgctgttgaaag

SEQ ID NO: 29999 - DNA, 388 bp, Zea mays
  Clone ID: LIB3180-054-P2-M1-D8
cagaccattagctttatctactccagagcgcagaagaacccgatcgacaccatgagggtgttgctcgttgccctcgctctcctggctctcgctgcgagcgccacctccacgcatacaagcggcggctgcggctgccagccaccgccgccggttcatctaccgccgccggtgcatctgccacctccggttcacctgccacctccggtgcatctcccaccgccggtccacctgccgccgccggtccacctgccaccgccggtccatgtgccgccgccggttcatctgccgccgccaccatgccactaccctactcaaccgccccggcctcagcctcatccccagccacacccaatcccgtgccaacagccgtattcaagcccgtgccagc

SEQ ID NO: 30000 - DNA, 342 bp, Zea mays
  Clone ID: LIB3180-054-P2-M1-E1
gttctagatcgcgagcgccgcccttttttttttttttttttcatagggtagaaaataaaaggctgaataattgttatggtagaatcctcaagcaaagtatattattatggctggtggacccaaagcataaaccaaaccaagtagaggcaccaactttcgaccgttttttgcttccagtttcgaaacgtttctccttcgcatcgcgtcgtcacatctgggaccctgcaacatcacctcccttcacacttcacagccagcgcctttcacttctccgtggcgccggcgcgcacaaactgcacgaactcgtccaggttgcggtcagagctgtcaccgggtgccacc

SEQ ID NO: 30001 - DNA, 300 bp, Zea mays
  Clone ID: LIB3180-054-P2-M1-E2
agctcaagcatcagcggcaggagctctgggcagcgtgcgcacacgtgggttacctagctcgctctgctagcctaccatggctgaccaccaccggggcgcgacgggaggtggcgggggctacggcgacctccagcgcgggggcggcatgcacggcgaggcgcagcagcagcagaagcagggcgccatgatgacggcgctcaaggccgcgacggccgcgaccttcggcgggtcgatgctggtgctgtccgggctgatcctggccggcaccgtgatcgcgctcacggtggccaccctcttgct

SEQ ID NO: 30002 - DNA, 400 bp, Zea mays
  Clone ID: LIB3180-054-P2-M1-E3
ctttcaggcattgctggaacaagcttattcaactcagttagtttgatggcttataatgttttctacacaagcattcctgttttaacgactgtactggacaaggatttatctgaaaagacagtgatgcaaaatccagagatattactttactgccaagctggaaggcttctcaatccaagtacctttgctggttggtttggtcgatcattgtatcatgcaatcattattttcttaataaccatccatgcatatgctaatgagaaaagcgagatggaggagctctcaatggttgcactctcaggaagcatttggttgcaggcatttgttgtgacgttggagatgaattccttcacatctgtgcaacttctggccatatggggaaacctcattgccttctatg

SEQ ID NO: 30003 - DNA, 296 bp, Zea mays
  Clone ID: LIB3180-054-P2-M1-E8
gttgtctaccgtgtccgtgtgaagcgtggtggcaggaagaggcctgtgcccaagggtattgtctatggcaagcccaagcaccagggtatcacccagctcaagttccagaggaacaagaggtctgtcgctgaggagagagctggacgtaagcttggtggactgagggttcttaactcctactgggtgaatgaggatagtacctacaagtactttgagatcatccttgtggacgtttctctcatagccatcaaaaccgacccgaggatcaacttggttatgcaaccctttgcacaatc

SEQ ID NO: 30004 - DNA, 138 bp, Zea mays
  Clone ID: LIB3180-054-P2-M1-F1
cttccctaaaggtggctggccgacacaaggcgtgaccggagattgacctggagaccattggggattccattgccttgcggggggccttgagggaagaaggccccaattttttccaaattattgccattgcaaatggtt

SEQ ID NO: 30005 - DNA, 394 bp, Zea mays
  Clone ID: LIB3180-054-P2-M1-F2
cgcatgccaaggaagagtagtaacatggttgataataggtacttgtagctaaggaaggagtcagttcaagcatgtttggacgcatgccaaggaagagtagtaacaataccaagtattacgaggttcttggtgtgtctaagaccgcaagtcaggatgagcttaagaaagcatacagaaaagctgccataaaaaaccatcctgataagggtggagaccctgaaaagtttaaagagctgtctcaagcttatgatgttcttagtgacccggagaagagggagatctatgaccagtatggagaagatgcccttaaggaaggaatgggaggaggcagcagcagtgatttccatagccctttcgacatttttgagcaactttttccgggttctagcacctt

SEQ ID NO: 30006 - DNA, 248 bp, Zea mays
  unsure at all n locations
  Clone ID: LIB3180-054-P2-M1-F3
cttgtttctagacacacagacaaccggagcgggaatcggtactaccaaccgaggacaatgtcacactaacagcgcctggacccatgccaaagaagagtaaatacaataccaatcattacgaggttcttggtgtgactaacaccccatgtcangattagcttaaaaaagtatacacaaaagctgacattaaaaaccatcctgataaggatggttaccctataaagcttaaagagctgtcttaagcttat

SEQ ID NO: 30007 - DNA, 272 bp, Zea mays
  Clone ID: LIB3180-054-P2-M1-F7
ctccgcgctcctccaaaccaaactgaaccctatcctagcacgagtgcacgacggtggcagcaggagatggtggggacggcggaaggcggcgcggagagggcggtgcggcggtgggtggacgccgccggcgggcgcctggtcctggacggcgggctggccacggagctcgaggccaacggcgccgacctcaacgacccgctctggagcgccaagtgcctgctctccttcccgcacctcatacgcaaggtccatatggactacctagaatacgg

SEQ ID NO: 30008 - DNA, 334 bp, Zea mays
  Clone ID: LIB3180-054-P2-M1-F9
caactagcaacatagaaagcacaatagtgtaccaacaatggcagccaaaatattttgcttccttatgctccttggtctttctgcaagtgctgctaccgcaaccattttcccacaatgctcacaagctcctatagcttcctttcttcccccatacctctcaccagcggtgtcttcagtatgtgaaaacccaattcttcaaccctacaggatccaacaggcaatcgcagcaagcatgttacctttatcacccttgttcctccaacaaccgtgagccctattacagcagttacctttggtgcatttgttggcacaaaacatcaaggcacaacaacta

SEQ ID NO: 30009 - DNA, 350 bp, Zea mays
  Clone ID: LIB3180-054-P2-M1-G1
ttcttataatgaagaaatgcgcaatcttcatcgtagggctcgtgaaaatgctttgcggattttccaagagaatgaaaacttgaggattgacttagaaagtaagaagagagaactgaacttgcgagctaaggagcttgacaaaatatcaactgagaatgctaacgacaggaagacacttgatgatgagaagcagaaggcaaaatacgataatagtgaacttgagctagcaagtatagagcagcagagggctgatgcagatgttctgaagctattggctgaccaggagagggaaaaggaagatgtacttgctagaatgcttcaacttgaaaaagagcttcatgagaagcagc

SEQ ID NO: 30010 - DNA, 187 bp, Zea mays
  Clone ID: LIB3180-054-P2-M1-G2
cgcatctggcacgagcagccaagcaaataaaagtagagcggcgagcgacgaccggcctgggccactctttcggccgagcgtagccagcaggtcgtcgtcgtcgtcgtcgtcgtcgtcgcagcacccggccggctagcatggccacgaggaggcagtggtggtggtggtgcctgctggcggcgatttg

SEQ ID NO: 30011 - DNA, 322 bp, Zea mays
  Clone ID: LIB3180-054-P2-M1-G3
gcaagacctggacagaagtggcacgtcttctacgccactgagtacccagagcaaccaatggttaaccttgaaatgtgcatgactggtctggacaagaagaaagcttctgtctttttcaagactaatgctgatgggaacacaacatgtgccaaggaaatgacaaagctctctggcatctttgaaatcatccccgagatggagatctgcgattttgactttgaaccctgtggctactccatgaatgcgatccatggctctgcattcttcacatttcatgtgacgcccgaggacggttttatgttttgccagtttttgtggttat

SEQ ID NO: 30012 - DNA, 139 bp, Zea mays
  Clone ID: LIB3180-054-P2-M1-G7
tgtccgccttctctctctctctaacccactgccagccacctgtgcgaccggggcgaccactctccaagtaaattttcttccgcccacctgactacgcctcgacctcggcctcggcgccgccttcgttcgcctgacgcgg

SEQ ID NO: 30013 - DNA, 414 bp, Zea mays
  unsure at all n locations
  Clone ID: LIB3180-054-P2-M1-G9
cgtctctcacataattttacgtggccatgcctgtatttgagcgagttccagaaagaggcatcagatgctctaatatatcatnaagtgttagcaaccattatatggtttnntttgggagtgtctatgnntttagtganntcagccaggaagtaacccatgttatcnagaccctactagtcctttggaacataatatatacggttggataggatnagagatgtcaacctcaattcatgntgtaaatacaatatcnttttccttattgcttatatgcaaatatatgaaacccatcagctggccctgaatggaagctatatcggttattctaccttactgcaaaattgttttaagtggcagtatctaatatacaattgatgggtgcgatctaagtgtcattctttcccattgccggat

SEQ ID NO: 30014 - DNA, 395 bp, Zea mays
  Clone ID: LIB3180-054-P2-M1-H1
cacacctccgcccgaagccgccagtcggactacgagcggcggcggcgcctcggctcccctgatctccctcaccggaatggacggccaggctccgccgcttctcgacgccgtcgtgctcgagccccttgcagttggcgacgagctccatccacggcgtcctgtcgaggtggaggacgctccgggcgccgctccgccctccggtatggacggccaggttccacctctctacaacgtcacgcgggatcctctgaccgtgtccgacgagctgctaaccacgggcgaggtggtggatgacgccctacccgtcgcgcccgacatcgtcaagggcgaggtgatggaggacgacgtcctacccgtcgcaactgacatcatcaacgacgccgcctcggagtgcc

SEQ ID NO: 30015 - DNA, 317 bp, Zea mays
  unsure at all n locations
  Clone ID: LIB3180-054-P2-M1-H2
gaatgctctcctcgaggctctctttgacggtgtgggcaagggatttgcaaaggaggtcgtgaagaacaagaagtaccttgcagttgctgtgccagatgagggtgcccagaccctgctggttcaagccatcgaggcttttggcagcaagtgcaacccctaggcgctgaaggaggtcccagttgtnctgaaagccctgtacgacggagatatcctggaggaggaaaccgttgtggactgtgacaacgctgttgtcgcatcttggaaaggactcccatgtcgtcaagaatgcctagccgtttgttgagttgctccagagc

SEQ ID NO: 30016 - DNA, 391 bp, Zea mays
  Clone ID: LIB3180-054-P2-M1-H3
ctgaattaggaatggtggatcatcccattcctgtgaacaatgctgttgctgctgcttcagaagaagtgctgaaatcagatgaagtgacagcagatgaggataacactacttcagcaacttcaaaccaaaacaatccagtggtaccacaagttaaagaagcgctgaaagcagacgaggataacagtgcttcagctacttcgaaccaaaacaacccagaggtgcccaaagtagaagaatatgccgatgccagcaaatcttattcagagccattggaccttgcaaagtacagttcagctgtagaattggaggtgcttggtctggagaagctaaaaatagagctgcaatctcgtggattaaaatgtggtggaactttacaggagcgagctacccg

SEQ ID NO: 30017 - DNA, 382 bp, Zea mays
  Clone ID: LIB3180-054-P2-M1-H7
gccggttcctcccccgaccccggcgccccaccgcagccgccggctcccaccgcccggcgcaccccgtcacctctccaccaaccggatacccggacggatccgctcccacctggatcctgatccggggaagtcaaaggggagatcgaagcttgagcagagggagccaaaatggtgaaggacacgcggtactacgacctgctgggcgtggacccgtccgccaccgagtccgagatcaagaaggcgtactacgtcaaggcgaggctggtccaccccgatttgaacccgaatgatccgcaggccgcttagaagttccaagaactaggttaagcataccaagttcttaggggccctacacagcgccaagcttattatttcaatggga

SEQ ID NO: 30018 - DNA, 173 bp, Zea mays
  Clone ID: LIB3180-054-P2-M1-H8
ttcttttctgttcctccctcgaccccgttggggcaccttattcgtcgggtgggggcgtccttctcaccctttcacctctacaccaaccgtatacctggacggatccgttcccacctgtttcctgatccgtggaagtcaaaggggatatctaagcttgagcatttgcagccatt

SEQ ID NO: 30019 - DNA, 376 bp, Zea mays
  Clone ID: LIB3180-054-P2-M1-H9
gaacacggccctaactaaaccctagctaagggaagggaaacaagaccatggatgcctccaagctccgcgagcttcgcgacttcgtcgaggcgtgcaagaagaatccttcgctcctcgccgaccccaacctctccttcttccgggattacctccagagtttgggtgccaaaattcccgccgccgccccctctttcgaaagtcccaagagatcttccatggacgacattgatgacgacggtgatgacgacgacgatttggatatgagggatcccactcctgatcgagacgagctcgatgaagagattgatgagtctgatcttggactcgtaggagataattttcagtctgaccattacgacccatctaataatgatgg

SEQ ID NO: 30020 - DNA, 424 bp, Zea mays
  Clone ID: LIB3180-055-P2-M1-A1
gctgcattgaactctgctgcttatttgcaacaacaattaccattcagccagctagttgctgcctacccccagcaatttcttccattcaaccaactagcagcattgaactctgctgcttatttacagcagcaacaactactaccattcagccagctagctgatgtgagccctgctgccttcttgacacaacaacagttgttgccgttctacctgcacgctatgcctaacgctggcaccctcttacaactgcaacaattgctgccattcaaccaacttgctttgacaaactcaacagtgttctaccaacaacccatcattggtggtgccctcttttagattgcttatgagttataggtcaataatgaagttttttggatgatgtttgtggcgtcccacaaataagaaagtacatttctaggatctt

SEQ ID NO: 30021 - DNA, 296 bp, Zea mays
  Clone ID: LIB3180-055-P2-M1-A10
attcagaatccggacctcacatatgtgacaataattacaactgggcacaggctacattaaagacatgatacctaaccaaatattaggctgctcagaatggtaaggacgaaatcgtgcaggactggaactggaacgaggctcttacatactcacctgatgaccaagcagcatcccaaagagccagggacttccacattggctggtttgttgatccattgataaacggacactatccacagataatgcaagatctcgtgaaggagaggctgcccaggtttactcctgagcaggctaaa

SEQ ID NO: 30022 - DNA, 181 bp, Zea mays
  Clone ID: LIB3180-055-P2-M1-A11
ctgccgcgccgccaccctctacagataaggaagaggaggagggcaggatgtcgcaccgtaagttcgagcacccgaggcacggttccctcggcttccttcccaggaagcgctccttccgtcaccgtggcatggtgaattcattccctatgtatgactctaataagccttgtcatcttactgt

SEQ ID NO: 30023 - DNA, 355 bp, Zea mays
  Clone ID: LIB3180-055-P2-M1-A12
ggagaatcagccgtggactgtggcagtcttgcgtccatgcctgacattgcgttcaccattggaggcaagaagttcaagctgaaaccagagcagtacattctgaaggttggtgaaggacaggctgcccagtgcatcagcggattcacagctatggatatcccaccaccccgtggccctctctggatcttgggtgatgttttcatgggagtctaccacaccgtcttcgactatggcaagctgagggttggcttcgcagagtcggcctagggatatggtttggcagcaacccgtccagaggcaaacgcgtaatttgtgtgtttatgcgaccggcttagtgtgtatatattctactaca

SEQ ID NO: 30024 - DNA, 430 bp, Zea mays
  Clone ID: LIB3180-055-P2-M1-A2
cgagatcgaccaaagcgtcgacgcctcctcgatggccatctcggcctccatggagaatgctgcgggcgcggtggcgggggcaagtggcgccggcggtggcagcgggagaggcaagaagaaagggatgccggccaagaacctcatggcggagcgccggcgtcgcaagaagctcaatgaccgcctctacatgctgcgctcggtggtgccgaagatcagcaagatggatagggcttctatccttggcgacgcaattgagtatctgaaggagctcctgcagaggatcagcgatcttcacaatgaacttgagtcagctccgagctcttcgcttgttggaccaacatcagctagcttcaacccatcaacaccgacattgcagacatttcctggccaggtcaaagaagaactttgcccgggctcattcccaaaccct

SEQ ID NO: 30025 - DNA, 124 bp, Zea mays
  Clone ID: LIB3180-055-P2-M1-A3
acgctagttctagatcgcgagcggacgaacttttttttttttttattaattgagggagggtattaataaattaattaataaattaaatagaaaaaaaaataaaaaaaaaagatggataaataat

SEQ ID NO: 30026 - DNA, 107 bp, Zea mays
  unsure at all n locations
  Clone ID: LIB3180-055-P2-M1-A5
tgacgatcggaggccatgtgctgcgcgaaggtgagtggctgtcgctgaatgggtcgactggtgaggngatccttaataaccaaacactttccccaccaaaatttaaa

SEQ ID NO: 30027 - DNA, 140 bp, Zea mays
  unsure at all n locations
  Clone ID: LIB3180-055-P2-M1-A6
cgttccactcctaaacccagaacccagcccgccgcaaccctagccgccggcgccgcgcgccgncggcattacaccactgccgtcgccacccccatggccgcgccgtcagaggacgcgttgcggttcgcgcttctgtttta

SEQ ID NO: 30028 - DNA, 200 bp, Zea mays
  Clone ID: LIB3180-055-P2-M1-A9
tcttagaagttggctgccgctttgccagaaggtggagttctgctcctagggaatgttagattctacaaggaggaagagaagaacgaaccttactttgctaagaagctagcatctgttgcttacctctatgtcaatgatgcttttgtcacggcacacatagctcatgcttcaaccgaaggagttaccaagtattcgaagcc

SEQ ID NO: 30029 - DNA, 322 bp, Zea mays
  Clone ID: LIB3180-055-P2-M1-B1
tttttctaacacggtctccctcttcctgtcagtagtagagtgagagtgaggcagcgagtggaatacaaggggaaatggtgaagggagctttatgggatctatattgccgtttgtttctttatagatttttttaatatattgttattttttttctatttttattctaaattttttatttattttttgatatttaatatattttatttatttctatattttgtttatattattttatttatttatatattatattattattttttttaattgtatttatttagtttttatattttttttttctatctttatcctttttttttat

SEQ ID NO: 30030 - DNA, 417 bp, Zea mays
  Clone ID: LIB3180-055-P2-M1-B10
ttcagtagcagaaaaggaggaggcatctgaagagattcattcgctgcataaaacgctcgatggaatgatcgagcacaaagcagaattagaaatacaggtatcttctactatacaagagcacgaagaactgaagagcaagtaccaaaatacaatggaagagaaacagacgttgagtgataaatatgaaaccgcaaagaaagagctcgaggatgcaatagccaagttggaggaggaaatgaatgtagacaagtcagaaaaagagtctcacatctcaaaactggagcgacagattacattatctgagataaagtacatggaggagataaagaccatgcaagtggagacaactgaaaagaatgaagcactaacagccaagatgcaggaacacacagacctacagcatgagaaagatgagtt

SEQ ID NO: 30031 - DNA, 303 bp, Zea mays
  Clone ID: LIB3180-055-P2-M1-B11
attacatatgagcgagagagtatttcttacagagatccaaaagagcgtgttaaagattggaaggaagttgcaatcgaatcaacacctggtccactattaaatacacaatctgctcgttgcatggactgtggtactcctttctgtcatcaggaaagctcaagtgctggctgtcctcttggaaataagatcccagaattcaatgaattagttcaccagaacagatggctcgaagcattggatcgactacttgagacaaacaactttcttgaatttactggacgtgtatgccctgcttcttgttag

SEQ ID NO: 30032 - DNA, 352 bp, Zea mays
  Clone ID: LIB3180-055-P2-M1-B12
ctgttctagaataccatccacatccaggccgaccctgagggatgtgactccgaccgtctgcgctcacagttctttgtgatcctttttcacgagggagagagtagagggaagggaaaaggtcacttttttttctgtaggaggaatccaatcgccatttgcgagggcacatagctgctttaccatatccgggcccacgagaacctgtcttttcactctcgcatccgctgcttcctcataaagaccctctacgaatcctagccagcatctggttactctggtcccccactttgagctggatccaagaaccccttatgcggtttattggcgctcgcctgttgacctggatagtttt

SEQ ID NO: 30033 - DNA, 303 bp, Zea mays
  Clone ID: LIB3180-055-P2-M1-B2
accagatgtgctaactcatccaagcttggagggagtaaaagcgtgggtgtgaaatatttgaaatctggtgtatcaagagatgcattaaagcctaatggaaatgctatttttctttttttttatgttttttttttttatattattattattattttgtttttattaaaatatttattaatattacttttatagttatttgttttttttttttttatattttatattatattttatctttattataattttttatatttttattgttatattaatttttaacattaatatttattattaattatt

SEQ ID NO: 30034 - DNA, 418 bp, Zea mays
  Clone ID: LIB3180-055-P2-M1-B3
ggagaaacgggaagcctcagaagctgcaaggcaatcacagcaagagagccacaccaccaccggtccaagtacatcgtcgagtatccaacagccatcacagcacaacccctcaaacgttgcacctggcccatccacaatgccacacaccgcttgggtcgcccagaatcggaatcctcaacagttccgctagcatcatcatactcgcccgtgctggctccatccccaagaccacctctaaaatgatagaaatcaagtgcacactgtacagtatcggatacctttttgttgttctgggagtggtcccgcatgcggacgccaaggctatttgttccattcgttgacaatgcgatgatgataggaggagtattaaaaattggcctccttcctggagcatgtaaagagatcgatatgtaaaatg

SEQ ID NO: 30035 - DNA, 187 bp, Zea mays
  Clone ID: LIB3180-055-P2-M1-B6
gtctagtcttgcttcgccgaattccaaaccctagcctcgcctgttgcgggcgcggcggagatggcgaagactctgcgatccaagcgcgagaagcggatgtggacattgcgcccagagatagcggagccattgtacaacaagaaggaggccgccaagcttaccgcgcaggccgccgcgcttgctgatt

SEQ ID NO: 30036 - DNA, 362 bp, Zea mays
  Clone ID: LIB3180-055-P2-M1-B7
tcgaaaatgctcaggttctggtatcagcgtttctcagaacaaaatgcagattggttactggtggcacagataattacttaatactttgggatctgagaactcttggtttgactggtaagatctttgagaaggtctgtgaggcatgcctcatatctatcaacaagacaccaatttatggggataatggctcaatatcctctggtggtgtgcggatcggaacacctgcaatgactactagaggttgcctagaagaggacttctagtcgattgcagacttcctaataaggtctactcaaattgctagcaatgttctgaaagaacatggcaaagtgcaaaaggagtttctaagaggcctaatgaac

SEQ ID NO: 30037 - DNA, 155 bp, Zea mays
  Clone ID: LIB3180-055-P2-M1-B8
tttactgtctctgtggcagaagatgagctcttgcgcattctgattctggtcaggaacttcttgcctgggtaccaacaggtagttcaaggcgaatgtatcgtaatcggcatttttctatatatgttattattctttaatttaaaacttgttttata

SEQ ID NO: 30038 - DNA, 377 bp, Zea mays
  unsure at all n locations
  Clone ID: LIB3180-055-P2-M1-B9
tctgccaaaatatagttggaagttttagctggtacaccattagggtgctgggtgaaccttttttactcttgtgcagtaaagattctttttgtcagccttcttgattttgttagataagcggntcaggtgttttctataattaatttttttattttttttattttctttgtatcttctcttattttttctttttattggttatacttattgtgtctccctttttttcccggggcggatgtattcgttgtattttcttgtaggctattctttttattcttattttttaattggggataaatatattttgtatgtggatttttactattttattaatttttcttttttttcctttgcttctttttattttcttctttttt

SEQ ID NO: 30039 - DNA, 422 bp, Zea mays
  Clone ID: LIB3180-055-P2-M1-C1
cctaatcctaaatcctatcgcgccgcacacccgctcctcggctcctctccgctgctctctgctctctcggtctcggggtacctccgcttggcggctcgccggctccctcctcctggcgcggtgcacggcgaactccgacggctccctgctctctcggtctcggggtccttccttttggcgcggtgcacggcgaactcaggtgctccctcctcccggcgcggcgtacgtcgatctccggtagctccctcctccctgctgctcaaggtatcatataattctggagtcaaacattttatattttggcaggtatcttctataatttcaattgttgggcatgtctgaactgaaaaaacatagacattttccgtgttgtcgattattgcacatttaagggatcaccacatggacagattcttagtctt

SEQ ID NO: 30040 - DNA, 250 bp, Zea mays
  Clone ID: LIB3180-055-P2-M1-C10
ttacgtagcgccacaaacaacgaatgttcctatctatcgtggccaaaaggatgtttcgtgcccatactgtggatcccgatttgttccttccatcgaaggacagctttgtaccatatgcgagcttgctgcggttggggcagatgcatcaggcctcctctgttctcatacacagtcgagataagcgatggtagttagaggacctcaatattcttttcatctactcaagttctttgattttataatattttat

SEQ ID NO: 30041 - DNA, 349 bp, Zea mays
  Clone ID: LIB3180-055-P2-M1-C11
caacaattcgtgcctgcctgccctgcctctcggccacctccctcgtcctgcccctcctacgccgcccccgtcctcggcccccacgcgctcgcgcggcgcacgaggcgacgaacccgacctcctcctccgcgcccgtccctgccaccggtcgccgatgagctcggagggctggggcgctgacctgagttttatggagagaggatgccagagctgcgaagcagtactcgccaagcatgcctaaggtcgaagaagcttgaagatctgcagctaggagagccgcctgcgaaaccggtgtcacctgctccgccgagggcaggaaagcgtgctcctacacctgctgctaggggca

SEQ ID NO: 30042 - DNA, 74 bp, Zea mays
  Clone ID: LIB3180-055-P2-M1-C12
tcttttttcgtcgcatcccatcccactaccacccatctcgtcatccgacgatggggggggcttctacctacact

SEQ ID NO: 30043 - DNA, 448 bp, Zea mays
  Clone ID: LIB3180-055-P2-M1-C2
tctctgattcgtgggcggctgtaccactgcggggcaagcccttatgcgtctgatggcttgattatagagaacaattcatattatgtatataattaatataatttataattaaacatttatttataataaatttaatagtttcaaattttttaatttttatattaatattttatatatatttttataaatatttaattttataaattatattataaataataataaaattaatataacttcttaatttattatatatatattaatattattaattttttctttatttaactaaatatttattaatttttattattttatctataaattatattattactaataattaaatattatctataactatattattctttaaattattatactttatatattataatatttttatatattttaatttattatatattttatatatttatattat

SEQ ID NO: 30044 - DNA, 278 bp, Zea mays
  Clone ID: LIB3180-055-P2-M1-C3
atgagcccttacgttctgaaaactatgtcgactgacaacaagggtttgtgttcaacaaccttcaaagttccagatgtttatggagttttccagttcaaagttgagtaccaaagactgggatatactggtctgtcttttacaaagcagattccagtacgtccttacagacataatgagtatgagagattcataacatcagcggacccatactacaccgccttattttcaacaatgggtgctttttttggaatctcgtttgtgttccttgtaccaaaaat

SEQ ID NO: 30045 - DNA, 416 bp, Zea mays
  Clone ID: LIB3180-055-P2-M1-C4
aggccgtgaaaaggtgccagtgaggacgaatccaagcacacgcccccactcgcttgaaactgccgcagagccccgcaaaggcaacgactgaaactgctccggcgaccacgagcgcacctaaaccccgcctgcgtctcgtcgccgagaagaatcttcgccttcgcgaagcctctccatctcccctctccgccgccgccgcttcctcgccgggactcgggagtcgggagcaatgcagctgtaccaccacccctattcgctggacagccagaaggtgcggatggcgctggaagagaagggcattgactacacatcttatcacgtcaatcctctcaccggcaaaaacatgaatgtggacttcttccgcatgaacccttccgcgaagctccctgtcttccagaatggagcgcatgtcatct

SEQ ID NO: 30046 - DNA, 173 bp, Zea mays
  Clone ID: LIB3180-055-P2-M1-C6
caagcaaggaatcccccgatggctcatcgcgttctcctcctcctctctctcgcgtcggccgccgcggttgccgccgccgtcgacgcggaggacccgctgatccggcaggtggttcccggtggagatgacaacgatctggaactgaacgctgagtcccactaactgagcattta

SEQ ID NO: 30047 - DNA, 69 bp, Zea mays
  unsure at all n locations
  Clone ID: LIB3180-055-P2-M1-C8
tttggtaagnccaagaagggtcagggggaagggccatatatggactgggggggggtgctagaaagtatg

SEQ ID NO: 30048 - DNA, 113 bp, Zea mays
  Clone ID: LIB3180-055-P2-M1-C9
tgccatttttgcttgctattccatgtacaagtctgaatctgacatgttctcctggcccaattggcatgtgtaggcagcttatctatatatgtgtgcagtgtgctattgctgat

SEQ ID NO: 30049 - DNA, 331 bp, Zea mays
  Clone ID: LIB3180-055-P2-M1-D1
cagcaatcgcaggaaccctagcgccgccgcacccgcaggaatgggtatcgacctcgtcgccggtgggaggaataagaagaccaagcgcactgcgcccaagtctgacgatgtctacctcaagctcctcgtcaagctctaccgtttcttggtcaggaggaccaagagcaatttcaacgctgtcattctcaagaggcttttcatgagtaaaaccaaccgaccaccaatctccatgcgccgccttgtcaagtttatggaaggaaaggagaagaacattgctgtcattgttggcacagtcacagatgacaaaaggatccaggagggtccagcaatg

SEQ ID NO: 30050 - DNA, 377 bp, Zea mays
  Clone ID: LIB3180-055-P2-M1-D10
tctgtcccctgctccattctcagccgccgccaatcccttcccgtgctccgcaaccgctgagtgagaagaagagatggccggcaagggcgatggcccggctatcggcatcgatctcggcacgacgtactcttgcgtcggcgtgtggcagcacgaccgcgtcgagatcattgccaacgaccagggtaaccgcaccacgccctcgtacgtcgccttcaccgactccgagcgcctcatcggagatgcggccaagaaccaggtcgccatgaaccccatcaacaccgtctttgatgccaagcgtctcatcggcaggaggttcagtgatgcgtctgtccagagtgatatcaagctgtggcccttcaaggtcatttctgggcctg

SEQ ID NO: 30051 - DNA, 195 bp, Zea mays
  Clone ID: LIB3180-055-P2-M1-D11
ggaggcgcgtgctctgctccactccacctcccccccccccctgcgccactgacgccgctcgttcgcgcagttttggtcttctggccagcagggcagggggggaacccgcgggagcgaggcgcgcgagcgagcgagcggagggaggaggaggatgatgcacgccaagtccgagtcggacgtgacgagcctggcggc

SEQ ID NO: 30052 - DNA, 311 bp, Zea mays
  Clone ID: LIB3180-055-P2-M1-D12
gggggaggcagagagcttgccatcccaagcaaaggttccctctccttccccacctcgcgctcaacccccctcatcctcccacatccgattgtgccctgcgctctgccgttctcttatccaagatttcgccggcggcggctcagggagcggacaaagattgtttttttttcgggctatggagacgaggcctgattcattcagccccgggcggtggagtggcttcctgaccgggtctgattcgtattggttcaaatgatctgggcggcttaattggttgcatccgcttccaccggggaatcggagctagggct

SEQ ID NO: 30053 - DNA, 93 bp, Zea mays
  Clone ID: LIB3180-055-P2-M1-D2
acatcacctcgaacggcggcgtctgcggcggcatcggttggttatcttttactatattttcaattcaattcaattcactaacccttttattac

SEQ ID NO: 30054 - DNA, 367 bp, Zea mays
  Clone ID: LIB3180-055-P2-M1-D3
gtgttatggttccttctctgttaagtggcacattgtcaaggacgtgcctggcagcattctcaaacacatcatcctagagaacaacgagaacaagcctgtcacgaacagccgtgacactcaagagatacacctagaacaaggccttcagatgctcaagatattcaaggagcatgtcagcaagacgtccatcctggatgacttcgccttctatgagagtcgccagaagctgatgcaggataagaggtcgaaacagcagcaggtccaaaagcaggtctgggacagtaggacccccatttctgtcactggaagcgagcaacagcatgaagctgctaatgggaagcccaatccgtcttgcaccagcaccaaa

SEQ ID NO: 30055 - DNA, 238 bp, Zea mays
  unsure at all n locations
  Clone ID: LIB3180-055-P2-M1-D4
gtngttgggccctcgtctaaggactggaggggtggaagggctgctagtttcaacatcattcccagcaacactggagctgctaaggctgctggcaaactgctttctgtccttaacggaaagcggactggaatgtctttccgtgtcccaaccgccgatgtttctgatgatgatctaactgctaggcttccgaagccagcccctctacatgagattaacggtcttgtcacggctctattgt

SEQ ID NO: 30056 - DNA, 328 bp, Zea mays
  Clone ID: LIB3180-055-P2-M1-D5
tcgctcacacacacatcgttgtccaaacaagagcggcgcggctcacggcggcctagctcgccggcctaacgaggccagatattccttaacctagctagctaacagctgactagatagatcgatccatcagctggcagccatgaatatgatcagggcagtacggcgccggttcaccgtcggccacctggctacggccaaggaccccgccacgctgcgccacgcggccgccgagctcctcgccaccgccatcttcgtcttcgccgccgagggcgccacgctctctctcgggaggatgcaccaccatgacaagggcggcggcggcctggcg

SEQ ID NO: 30057 - DNA, 86 bp, Zea mays
  Clone ID: LIB3180-055-P2-M1-D6
gttgtattttagtttagatttagagtacacttatgtatgcattgtttgacaatgtttatttatgatatattgaatggtacttattt

SEQ ID NO: 30058 - DNA, 252 bp, Zea mays
  Clone ID: LIB3180-055-P2-M1-D8
tcgggatctcacctcggggcgcgtccgcggcatctgggcaagcgagtggtagagcccgcagccatgagatggtatgcatcggtagcctcctgagggcgctggtcctgagtgcggcggcgtctgcgggcaggcgccgggggcccaggatcctgtgtggccacgaggcggatgtacgcgtgactcctcggcacggacacggctggcgcagattccgggcagtcacgggaaggatgatgctggactcctatgact

SEQ ID NO: 30059 - DNA, 75 bp, Zea mays
  unsure at all n locations
  Clone ID: LIB3180-055-P2-M1-D9
ttcgnctggtgttggattctactacccctccggttcgggttcaaattcgagaggttgtgctcccatcaataaaat

SEQ ID NO: 30060 - DNA, 425 bp, Zea mays
  Clone ID: LIB3180-055-P2-M1-E1
tctaccgtagccgccacccgctcgctcgcctccgctccggcagcgagctctatcccccgcgacgagcagcagctgccaccgacgcacgcagaccggggaataaatattggtattggtagtgtgatatctataagaagtcaagatggtgaagttcacagctgaagagctccgtgctatcatggacaaaaagaacaacattcgtaacatgtctgtcattgctcatgtggaccatggcaagtctacgcttacagattcccttgtggcagctgctgggattattgcccaggaagttgctggtgatgttcgcatgactgatactcgtgcagatgaagcagagcgtggcattacaatcaaatctactggtatctctctttactatgagatgactgacgagtcactgaagaactacaagggtgagagagatg

SEQ ID NO: 30061 - DNA, 333 bp, Zea mays
  Clone ID: LIB3180-055-P2-M1-E11
aggtccaccaaccttgactggtacaaaggcccgaccctgcttgaggctctggaccagatcaccgagcccaagagaccttcggacaagcccctgcgtctccccctgcaggatgtgtacaagattggtggtattggaactgtaccggttggtcgtgtggagactggtgtcatcaagcctggtatggttgtcaccttcggaccaactggcctgactactgaggtgaagtctgatgagatgcaccacgaggctttttaggaggcccttcctggtgacactgtgggctttaatttgaaaaacgttgctttgaacgttctaaatctagattgttttttt

SEQ ID NO: 30062 - DNA, 414 bp, Zea mays
  Clone ID: LIB3180-055-P2-M1-E12
aacagccgcatccaagcccgtgccagctgcagggaacctgcggcgttggcagcaccccgatcctgggccagtgcgtcgagttcctgaggcatcagtgcagcccgacggcgacgccctactgctcgcctcagtgccagtcgttgcggcagcagtgttgccagcagctcaggcaggtggagccgcagcaccggtaccaggcgatcttcggcttggtcctccagtccatcctgcagcagcagccgcaaagcggccaggtcgcggggctgttggcggcgcagatagcgcagcaactgacggcgatgtgcggcctgcagcagccgactccatgcccctacgctgctgccggcggtgtcccccactgaagaaactatgtgctgtagtatagcctgtggctagctagctagttgagtcatt

SEQ ID NO: 30063 - DNA, 168 bp, Zea mays
  Clone ID: LIB3180-055-P2-M1-E3
ccatatcgctaccgccaatccgccatgatgctcccgacggccaccgcgacggccggcttcctcaccgcggcgccttcctctttctccacccgccgtcggcgcagtcgcgccatcttcgcatccctttcgccgtccttctccttctcggaggagccgatgttggtgcgc

SEQ ID NO: 30064 - DNA, 277 bp, Zea mays
  Clone ID: LIB3180-055-P2-M1-E4
agattgagagggggagagacacagaggcctcactccacacactgtcttgtgtctgagtcccagagctttcttggatcgcgaggaatccactggaaattttgcaattgtggtagagaactgtatcgtccgacgaaggtgcatggtgttggccatgggtcacggcagggaacagagacgagcaggtcggcgctctccccccagctcattgatcctgacctcgctataaggtagtcctgcggtggcctatgaatttcactcgatcgaacacgacatgaag

SEQ ID NO: 30065 - DNA, 203 bp, Zea mays
  Clone ID: LIB3180-055-P2-M1-E5
attcggttgttcgacacccggggaagaggataaattattatgtgggtggtttaataatttttaattataaaattaaaattaataattatattattttttttttataaattgtataatttttatttttatattatttttattttagagcttatacttacaacaaacttttaattttttgttttttttatattttattattatat

SEQ ID NO: 30066 - DNA, 258 bp, Zea mays
  Clone ID: LIB3180-055-P2-M1-E6
ttgtgtgttaagcacaacccccacccgccacaggcgggtgcgcatgtgagcgggcggcggggccgggagactagacgagggcaggaagtttctgatgcatcagtgcagcccgacggcgacgccctactgctcgccttagtgccagtcgttgcttatataatatattttatatatttattttttgttgttttctataattttttactaaatttgctatatgtgtttgttttctacaattttaatttcttctatttattt

SEQ ID NO: 30067 - DNA, 388 bp, Zea mays
  Clone ID: LIB3180-055-P2-M1-E7
caacaagcaacatagaaagtggaatccagtagcaacaatagagcaacaatggagaccaagatattttccctccttatgctccttgctctttctacatgtgttgctaacgcgacaattttccctcaatgctcacaagctcctatagcttccctttttcccccataccttccatcaattatagcttcagtatgtgaaaacccagctcttcaaccatataggcttcaacaagcaatcgcagcaagcaacatacctttatcgcccttgttgtgtcaacaatcgccagccctatctttggtgcagtcattggtacaaaccatcaaggcacaacagctgcagcaactcgggctacctgtgatcaaccaaagagctctggcaaacctttctccct

SEQ ID NO: 30068 - DNA, 130 bp, Zea mays
  Clone ID: LIB3180-055-P2-M1-E8
tctcaactgctatattctcaactataaagcaggcaacagctctgggctggtgggacgcctaaagattatccacacctctagaaagttcatgggccaaatatacatcccggtgatgaactggttcttgctg

SEQ ID NO: 30069 - DNA, 161 bp, Zea mays
  unsure at all n locations
  Clone ID: LIB3180-055-P2-M1-E9
tctcttgtacgcttgcctcaaaacccctggcgccgtgctaaaaccctaggcctggaattccttcccctgcccgcgcggagcagacgagcctgagcccgtncttctcgtccatggcgacctcaggggcctccgctaacctttgggtactgtttggacttgga

SEQ ID NO: 30070 - DNA, 264 bp, Zea mays
  unsure at all n locations
  Clone ID: LIB3180-055-P2-M1-F1
tcgggttgctggaatcagaaccccggaggatcttgatgccatgaaggacgttatgccacaggcctaccaagagctagtcgacaactgcaggatactggagagccactataaagaaatgcaggacatcgaatttactgttcaggagagcaggttgtggatgttgcagtgcangacagggaaacgtacgggcaaaagcgccgtaaagatcgacgtggacatggttaacgagggacttgttgagccccaagctttaattaatatggt

SEQ ID NO: 30071 - DNA, 297 bp, Zea mays
  Clone ID: LIB3180-055-P2-M1-F11
tgtattcaggaaggcatgcttgaaataaaaatagccagaaacatgcaaggtgatccacgacgcagcacggcatttccagtgttttctttttggtgtctagttctgaatatattttaccgccagaccagcacgtaagcttgcctggcaatggtttttatttgttgctatgccatctcaaaagtcaaaaccatggatttatatcaaaagtcaaaagactttgagaagtatttatttggtagcctagctacaatgttcctcctctttgatgcatagcataggggatggggatgggtgatt

SEQ ID NO: 30072 - DNA, 418 bp, Zea mays
  Clone ID: LIB3180-055-P2-M1-F12
tcgctggaattattgtgctaccttgtggtgctggcaagtccttggttggtgtatctgcagcctgtcgtattaagaagagctgtttatgtttggccacaaatgctgtctccgtagatcaatgggcatttcagttcaagctttggtcgaccataaaagatgagaacattagtcgttttacatctgataacaaggagaagtttacagggatggctggtgtggttgttactacatataacatggctgcattcagtggtaaaaggtctgaagatacagagaagatcattgaagaaatccgaaacagagagtggggcttgcttctaatggatgaggcccatgttgtccctgcacatatgttcagaaaagtcatcagcattacttaatctcactgcaagctgggtcttactgctacccttgtgag

SEQ ID NO: 30073 - DNA, 142 bp, Zea mays
  Clone ID: LIB3180-055-P2-M1-F2
tttggttgatcaatcggaagcgccgccgccgcaaaggatcgggcagacgagacgagacgaggttatctgaggcgcagagctcagggtgaaagaagaatctagtgaaagtggaaggattcttgcacgggcttcttctgaagat

SEQ ID NO: 30074 - DNA, 458 bp, Zea mays
  Clone ID: LIB3180-055-P2-M1-F3
aaccttctttctttgtttctacattaaaacaaacttttaaattccttctcactcaagggggtgggggtgattaaaatataaatttattattataaaatttaaataatatttttactaatataaaatattttttattaaaatatataatattaataattttttttattatttattttatttaatttaattttacttaaaatttatttttaataatatttataactaaattataatatatatattttaaattatattctattaatatatttttatctaaattattttttcaaattttaaaaaatttttattaatattaaaataataaatataattattataattttatttataatattttataaattaaataatatataaaattcttataatttttacataattattaaattttttataattaattactatattttatatttattttatattataataat

SEQ ID NO: 30075 - DNA, 351 bp, Zea mays
  unsure at all n locations
  Clone ID: LIB3180-055-P2-M1-F4
atcgacaccatgagggagttgctagccgctctcgctcttcatgatgttgatgcgggtggcatcttcactcttactatatgatattgccgggaccccccacgtcccgggcgacatctaccacatcaactgcatcggcctggtgaaggggatcatggaggacgaccagatctgggaggcgctggagggctcccaccgtctgatcatctgcgacggggggcccatgaagccccgcatgactagggacgacctntataacatcaacgccgtacataataaggggctgttgactgtcattcccaagcactgtcataacgctcttgataatatgatcaaaaaccctgctaactccac

SEQ ID NO: 30076 - DNA, 166 bp, Zea mays
  Clone ID: LIB3180-055-P2-M1-F5
gctgatgcgttgatcctcaccgacgtcagacatcgtaatcaacttgaacagcggcgccagaacctatgcctccgcagggtgcttgctggtatcattacaatctggtagttttagtggttgggcttgactttctactattgagaaacacattacctagaattattta

SEQ ID NO: 30077 - DNA, 283 bp, Zea mays
  Clone ID: LIB3180-055-P2-M1-F6
catgtacccgacggggctgagggcgaaccgggccaccgaggccggttactggaaggcgacgggcaaggacaaggaggtctacaacgccgcggaaggggtggcggtactggtcggcatgaaaaagacgctcgtcttctacaggggcagggctcccaggggtgacaagacaaactgggtcatgcacgagtacaggctcgaaggcagaggcaggcttcccgccggcctcgcttcctaaaccgtgtcagccttcggcgattacaaggctggatataaagcttaagat

SEQ ID NO: 30078 - DNA, 155 bp, Zea mays
  unsure at all n locations
  Clone ID: LIB3180-055-P2-M1-F7
tcgctcacccgactcgtcagacgtcagccagcagttcgaaaccaaggatcgatgcaggagcttccggaaggcgaggcgcgcgcgcagcgtcgaggtgctggtgccggtaccanccatggatcgggctcgcggattcgtgtatttgtttggtgttt

SEQ ID NO: 30079 - DNA, 170 bp, Zea mays
  Clone ID: LIB3180-055-P2-M1-F9
tcgcgccgtcgtgcctcgacgacggcgggagacgccgcaagcaggtgagagtgggacgggcggtgactagcgggcgcttaggccgacatcggccccgcagcggcggggtagggtgcgtcgacacgcgggactgcgacttgggggggatagataccattatcttgttattt

SEQ ID NO: 30080 - DNA, 207 bp, Zea mays
  Clone ID: LIB3180-055-P2-M1-G10
tttttgacgcgtgggtcagattccattttgcggcccgaacaaaggtgtgaccggggtgggttaggcgactagattgcactattatttactttagatttttttgattaactttttttcttacggattatttttttcttattattttattttctaatttttatattaaacttttttatttaatttattattttttttaatttttttttt

SEQ ID NO: 30081 - DNA, 275 bp, Zea mays
  Clone ID: LIB3180-055-P2-M1-G11
gaagagatttcaacacgtgatgaaactaatactgtatgaaccgatggctgtggagcaatgcctagcggcggtctgaacatggatggacctcccacaaccattaatggtactggagttgaccgaatggcatttcttcaggctaatataacccgcgacaatactgagtttgcgaatggtgcaattgttggagacagatacatattctagttagaccattgtctttgtcatttgaagcaaaaacccgttctttaatctgtatcaacttactttgtcct

SEQ ID NO: 30082 - DNA, 157 bp, Zea mays
  Clone ID: LIB3180-055-P2-M1-G12
cacgaggggactcccgagcgcacgcgcgaatcgccgcggacctcgccggaggcggcgacgagctcggatcccggcgatctagtcgccggaggcggtcccgatggctcggcggtcgtcttcctcgtcgtcggggacctggcggtaccagaacctggtg

SEQ ID NO: 30083 - DNA, 230 bp, Zea mays
  Clone ID: LIB3180-055-P2-M1-G2
tcctctacctcgttcgtggcgacgacagggcgaccgccgctgccaccgccggctgtccactgtgggcctggtgctttgcccggccgttcgccggcgacgggcactcaccaccaggtgacaaaggaaaaggaagaggggcagcaaatcggtgcgctgctgttcattaaatgctggggaggaaataaacagatcaagggcctagtgaaatgatttcgttgctagggtgactg

SEQ ID NO: 30084 - DNA, 350 bp, Zea mays
  Clone ID: LIB3180-055-P2-M1-G3
attatttatatatataaaaaaacaaaaaaagtgcttgtttaataaaaaaataaggtttgatttaataaaataataaaatcatataaatattattaatttaaatatattataatttttattaattataataatcttatttatataatctatatattatatattttatttaatattatttatcataataatttacattatatatctaataataaaaatttaaataaatatataataaaataattctattattataacttattaataatatttaatatcattttaataataactatttatttatttaataatatatacaatataaaaatctatatttaacattatatatatta

SEQ ID NO: 30085 - DNA, 367 bp, Zea mays
  Clone ID: LIB3180-055-P2-M1-G4
ttttattaaaaagccaaagaggaagcctctttttgtgaagaacggtgcaattggtgggtgcctcattcaggtgaataactttatatgcatatagatttttttttatttcctatatttatttatttattgtttttttttatacattatttttattattttctttcctttattgctttttttgtctttttatattatttattattttttttttttcttttttttatttatatatttttatttttttttttttttttttattctgttgtttttttttttttttttttttttttttatttttatatttaatttattttttttttttttttttttttctattttttattttttttctttttttttttttttt

SEQ ID NO: 30086 - DNA, 378 bp, Zea mays
  Clone ID: LIB3180-055-P2-M1-G5
ggccgtcctgcccttccctgcccggtgggtatatgtaagctcagaccgccaccggaaccttctcgagcccgcggccgcacacctccgcccgaagccgccagtcggactacgagcggcggcggcgcctcggctcccctgatctccctcaccggaatggacggccaggctccgccgcttctcgacgccgtcgtgctcgagccccttgcagttggcgacgagctccatccacggcgtcctgtcgaggtggaggacgctccgggcgccgctccgccctccggtatggacggccaggttccacctctctacaacgtcacgcgggatcctctgaccgtgttcgacgagctgctaaccacgggcgaggtggtggatgacgcccta

SEQ ID NO: 30087 - DNA, 149 bp, Zea mays
  Clone ID: LIB3180-055-P2-M1-G6
tgttgaggagaaccgccgtgccctccgtgagcgcctattctgctgccctggtgcggtccagtacatcaacggtgtgatcctcttcgaggagaccctgtaccagaagaccaaggatggcaagccttttgttgatgtcctcaaggagggag

SEQ ID NO: 30088 - DNA, 256 bp, Zea mays
  unsure at all n locations
  Clone ID: LIB3180-055-P2-M1-G7
tttgaggggtggnccgatctnngtngggggggggttttttttttttggggggggggtnttttttnnttttttttttttttttttttgtgntttgttttgttgtttttttgttttttttttttttttttttgttgttgtttttttttttttttttttttttttttttttttttttttttttttttgtttttttttttttttttttttttttttttttttttttttttttttgttttttttttttttttgtttttttt

SEQ ID NO: 30089 - DNA, 433 bp, Zea mays
  unsure at all n locations
  Clone ID: LIB3180-055-P2-M1-G8
ttttctttgaagccgccgccgctgcagtgtccatagccaccgcaggagactgagatggggggttttnnatanacctatattattatttcttatcttatgtcttttttatttattcttttaattatatttatttttatctattactttattttattattttttattttttttttttcttttattttatttatttaaattcttcttatctatttttattttctttttaatttcattatttttttctttttattatttatattttttttttttttttatttatttatttattttttattatattactttatatatatttctttatatatctatttttatcatattcgatttttttatatttttattatatttttctttatttttctatctaattatattttttatttattattaattatttttgtatatatttttt

SEQ ID NO: 30090 - DNA, 204 bp, Zea mays
  Clone ID: LIB3180-055-P2-M1-G9
ttttcttccggctcaaggtacattgcgtgtgctaggcaagacacgcagctcaggtggggctcacacgcagagcaagagcgaggcgtgattcgccatgggcggcctcattatggaccaggccttcgtgcatgcccccgagcaccgccccaagcccattgtttccgatgccatcggtatccctttctatagaccttttgtctctgt

SEQ ID NO: 30091 - DNA, 421 bp, Zea mays
  Clone ID: LIB3180-055-P2-M1-H1
gcaacatagaaagtggaatccagtagcaacaatagagcaacaatggcgaccaagatattttccctccttatgctccttgctctttctgcatgtgttgctaacgcgacaattttccctcaatgctcacaagctcctatagcttcccttcttcccccataccttccatcaatgatagcttcagtatgtgaaaacccagctcttcaaccctataggctccaacaagcaatcgcagcaagcaacatacctttatcacccttgtttcaacaatcgccagccctatctttggtgcagtcattggtacaaaccatcagggcacagcagctgcagcaactcgtgctacctgtgatcaaccaagtagctctggcaaacctttctccctactctcagcaacaacaatttcttccattcaaccaactgtcta

SEQ ID NO: 30092 - DNA, 231 bp, Zea mays
  Clone ID: LIB3180-055-P2-M1-H10
tctttttttcaataatcaggttgctatcacggctgatccaaggtcaggggggggctcgcaatattgcacacatgtatcaaaagcattggatgctcctattttccatgttaacggtgatgatttggaggctgttgttcatgtatgtgatctcgtcatagattggctactgacatttcattcatatgtatttttgtactttttatgctttctgctatctggccatatataaat

SEQ ID NO: 30093 - DNA, 312 bp, Zea mays
  Clone ID: LIB3180-055-P2-M1-H11
tgtgttgtggaatccgggaatccaaagcaggcgggcagacaccgtgctgtgcggagcggtccaactaccgggcagaggcagaggcagaggcggagggcggggcgagagagccgtgcggctgtccaactccccttccctatccggtagcagctgctcctatatgacccccgcaccccagcaaaaaccttcccctttttccccttcacagccccgtactactatccccgctaccgatagccgtcgcgctgctcatttggtggcggttcgcctcccttatcccatccgacgccgtctgcttctactttagctttc

SEQ ID NO: 30094 - DNA, 424 bp, Zea mays
  unsure at all n locations
  Clone ID: LIB3180-055-P2-M1-H12
tgtttttggttgcagtgcangacagggaaacgtacgggcaaaagcgccgtaaagatcgccgtggacatggttaacgagggacttgttgagcgccgtgcggcgatcaagatggtagagccaggccacctggaccagcttcttcatcctcagtttgagaacccatcggcgtacaaggaccaagtcattgccacgggcttaccggcgtcacctggggccgctgtgggccaggttgtattcactgctgaggatgctgaaacatggcattcccaagggaaatcagttattttggtgagggcggagaccagccctgaggacgtcggcggcatgcacgcggctgccggaatccttacagaaagaggtggcatgaccttccatgccgccgtggtggcacgcgggtggtgaaaatgctgtgtctcgggatgct

SEQ ID NO: 30095 - DNA, 420 bp, Zea mays
  Clone ID: LIB3180-055-P2-M1-H2
ttcagagtccaggctccaggactaccaccactccgtctcgtctcgtcctcacaccccactccaccaccacctctgccttgcaaagctttccaccgatccgccgcctcgtccgcgcgctcgcaggcagcagtgtggactacccgccccatactccatcccctactcgaaggtgagcaaaccaaacccggcccggccgcgcgtctcatcactcccatcgtaattcgtaacctagtagcacggagacacctgttctcggcaccggtgcacgccggatcttctatcgtcggtaagcacacccagatattatccactgcaaaaagacggcttgatccgcaccccggaaacccagggctaggcgaataaaatccttgtttgggcatgtagggttttagcggctgtagcctagtataagccagtagc

SEQ ID NO: 30096 - DNA, 420 bp, Zea mays
  Clone ID: LIB3180-055-P2-M1-H3
gcacatcccgtcgcatcccatcccactaccacccatctcgtcgtccgccgattcgatccggttcttccaacccaggggcagtgatggcgacgaagaggagcgtgggcaccctcggcgaggcggatctgaaggggaagaaggtgttcgtgcgcgccgacctcaacgtcccgctcgacgatgcccagaagatcaccgacgacacccgcatccgcgcctccgtccccaccatcaagttcctcctcgagaagggcgccaaggtcatcctcgccagccacctgggtcgtccaaaaggtgtcaccccaaagtacagcttgaagcctcttgttccacgcttgtctgagctccttggagttgaagtcgtgatggccaatgatttgcattggtgaagaagttgagaagttggctgtcgctttgccagaa

SEQ ID NO: 30097 - DNA, 381 bp, Zea mays
  Clone ID: LIB3180-055-P2-M1-H4
ttgcggaggaggaaccagtgagccagcagaggccgggccgtcgccgtcgtggtcctcggccgccgcaacaacctagtcgtcgagccggcagcatgcagagcaggaagcacagtagcaacaaggagcacagcagagggaacagtcagcagtaagggcccaggcgcaggcgcagacggagccgctaacgcagcagtcttcggtggggctcatccggttcgagttgttattaactctgttactggaacacttttttttcttaattgtgtaactataatcttctttctgttatttttactctttaatttattatattattatctttttatttttttaatttttatttttcttatatttctatttataatttataattttttattt

SEQ ID NO: 30098 - DNA, 335 bp, Zea mays
  Clone ID: LIB3180-055-P2-M1-H5
gagcgagcgagcagaggcagcgcagcaatggcggcggcaatagtactctccggccaggtgcggccgcttccctcgtcgctgcccctgtccctgctgctgctcctcctcctgtgctgctccggcacctcgtggggatggagcacgtcccggggaggagccgccagggagtgcggcttcgatggcaagctggaggccctggagccgcgccacaaggtgcagtctgaggccggctccgtccagtacttcagccggttcaacgaagccgaccgggagctcacctgcgccggcatcttctcctgccgcgtcgtcttcaactccatgtgctttctgctccc

SEQ ID NO: 30099 - DNA, 148 bp, Zea mays
  Clone ID: LIB3180-055-P2-M1-H6
tggctcttggagctgatcggattttcacgcaaggtgctaagcttgttgatgaagctcttgcctcaggaaagatttatgatggagatgggttcaactacatcaaagaatcttttgaaaatggtactcttcaccttattgggttgttgag

SEQ ID NO: 30100 - DNA, 270 bp, Zea mays
  Clone ID: LIB3180-055-P2-M1-H7
ttggcacgcgacgcaactatcctaagcccgccactctggaagatacaacgctgcacgcctccgaccgatgatatacgatccaatggcaccctcactcctcgccgtcatgtccacgctatccttcctagccagcacaccgaagccgctaggggctgaccacacccgacagcctggactgcgcgtggccgtacttaaaacacgaccctgacaaggagacaccacataacgaccgcatactcacccgtatctagcagatccctgagaaaaccg

SEQ ID NO: 30101 - DNA, 61 bp, Zea mays
  Clone ID: LIB3180-055-P2-M1-H8
tttcttcgtactcctacataaccaaacccgggcccaaaatcttaaagactgcgggggagct

SEQ ID NO: 30102 - DNA, 407 bp, Zea mays
  Clone ID: LIB3180-055-P2-M1-H9
gtcaataatcaggttgctttcactactgatccaaggtcagggagatcctgacaatattgcacagatgtagcaaaagcattggatgctcctattttccatgttaacggtgatgatttggaggctgttgttcatgtctgtgagctcgccgcagaatggcgtcagacatttcattcagatgtagtggtggacattgtatgctaccggcgatttggccataatgaaattgatgagccgtccttcacccaacctaagatgtacaaggtgattaggaaccatccaagtgcgctagagatttatcaaaggaagttgttagagtctgggaagatctcaaaggaagatattgataggttaaacaaaaaggtcagcactatacttaatgaggaatttcagaacagcaaagactatgt

SEQ ID NO: 30103 - DNA, 137 bp, Zea mays
  unsure at all n locations
  Clone ID: LIB3180-057-P2-M1-A11
actgnaccggtcgcggctcctccatagtccatactctcgcgcgcctaaaccctagccatcctcctcgccgccggcgaccgccgccatgagccgctacgacggccgcgctgtggacgcgggcttctaccgcgaccgcc

SEQ ID NO: 30104 - DNA, 168 bp, Zea mays
  Clone ID: LIB3180-057-P2-M1-A12
tcggagcagccgcatccacaacctgcctctctcgtcccctggcggcgtccgcggcaggatggcggaatctacggcgaggacggtgaaggatgtcaacccgcacgagttcgtcaaggtctactccgtccacctcaagcgctccgtcaagatggagctccctgagtgggt

SEQ ID NO: 30105 - DNA, 119 bp, Zea mays
  Clone ID: LIB3180-057-P2-M1-B1
tcgtcttcccgtctcttcttcttcccccttgcacttcttggccgagcccctggtggtctcggcatcctgctcgatcgaagaatgctggatcaggcatattggaggtagcagcttaatac

SEQ ID NO: 30106 - DNA, 306 bp, Zea mays
  unsure at all n locations
  Clone ID: LIB3180-057-P2-M1-B11
tctcgaaggattatgtgcatatgcgcatctaagagcgcaacgatagaaagagggtgactacagtccagggtctgaacaaagaattcagctataacaagaacctcattgatctgaagaaggaattctgctgcaatggtactgaagttcaggacccagagctaggcctggtcattcagctccaaagtgaccagcgcaagaatggcctcctataaaactactatatctatggacaatgttttgcatccccttgtaacacagtttttttgcanacattgagttgaaattgagacagaatgaggaagatcc

SEQ ID NO: 30107 - DNA, 112 bp, Zea mays
  unsure at all n locations
  Clone ID: LIB3180-057-P2-M1-B12
ttcgttgattctgncgcatnccataccactaccaccgatctcgtcgtccgccgattgtatccggttcttccaacccaggggcagtgatggcgacgaagaggaacgcggtcac

SEQ ID NO: 30108 - DNA, 77 bp, Zea mays
  Clone ID: LIB3180-057-P2-M1-B2
atctttttctatcaattccaatgatgcaattcgcaaggagtgatgtcaatcggggatatttttcacaatactattat

SEQ ID NO: 30109 - DNA, 194 bp, Zea mays
  Clone ID: LIB3180-057-P2-M1-B4
ctataaggaaagctgacagcacatgcaggaagcgttaacgactttgcccgttgcccgaaacattgtgtttatacactctatcccgaaagtaagttcatatatacttaaggggctccgctgcaagtataacctgacaaggatagaatgggttgatattatcggatattacaatgaccattatgggaccgaggttg

SEQ ID NO: 30110 - DNA, 62 bp, Zea mays
  Clone ID: LIB3180-057-P2-M1-B7
tatagggtaagcaagaacgcctgcaggcacccggttccggaaatccactcatcgacccacac

SEQ ID NO: 30111 - DNA, 176 bp, Zea mays
  Clone ID: LIB3180-057-P2-M1-B8
tcgcgccactctcacgtctcgcccatcccgccactgctgctctccagagtccaggcgatccaggctgcgcggtcgttcggtgttgttagtcccgaccaccgccggccatggcatccaacggcatcgcccccagagatgtatgtgttgttggcgttgcacgcaccccttagggtggt

SEQ ID NO: 30112 - DNA, 112 bp, Zea mays
  Clone ID: LIB3180-057-P2-M1-C1
atcgatcattttttgcactgccattcctaggatatactgtgaccgccacgaggtcaagaacctgtacgaggagaggaatgaactttttagagtggttttttagtagtttatt

SEQ ID NO: 30113 - DNA, 203 bp, Zea mays
  Clone ID: LIB3180-057-P2-M1-D1
atagatacccttccccagtcagccgcgagcctcgtaccggcgcagccatggcggaggagcccgccatcgtcgacgccgcctcctccagctgcgaggtcgacctcggcaacctcatggcgtacgacccgtgtcaccacgtcgcagccgtcgcctccgcctccagggaggagctgaggcaggagtgcctgcggaaggggacggag

SEQ ID NO: 30114 - DNA, 119 bp, Zea mays
  Clone ID: LIB3180-057-P2-M1-D12
tttgaatgcactcccgctctgctccggacgatctggcatcctctgcctgccccgctggctccgcgcgtctgctctagtgatttgagacggagatccgccagagatcgaggagagggagg

SEQ ID NO: 30115 - DNA, 340 bp, Zea mays
  unsure at all n locations
  Clone ID: LIB3180-057-P2-M1-D2
gggggccaaaaagagggggggagagaggaggggggggggggggggggagggagaggggaggggggggggggaggggggggggggggggagnaggggggagggggggggggggggaaggggggagggggggggaggggggggggaggaggggggggggggaggaaggaggggggggggggggggggggggggggaaggccggagggcgaggggagggggggggggggcagcggaaggggcgggcggagggggagggagggagagggggggggggggggggggggggagggggggggggagggagggggggggaggggggcgggggggggaggggggggggg

SEQ ID NO: 30116 - DNA, 121 bp, Zea mays
  Clone ID: LIB3180-057-P2-M1-E1
ttgtttacgcggccgcagaccattagctcgagggactccagagcgcagaagagcgccgagcgacaccatgagggagttgtttgtagacctcgaacaacgagcagaggacgccaagccccac

SEQ ID NO: 30117 - DNA, 126 bp, Zea mays
  unsure at all n locations
  Clone ID: LIB3180-057-P2-M1-E9
acgatttctagganncngactcagaggcggggagtcataatgccggcacacgggggctctccaccactggcttctcaaccaagcgcgatgaccaattgtgtgaatcaacggttcctctcgtactag

SEQ ID NO: 30118 - DNA, 289 bp, Zea mays
  unsure at all n locations
  Clone ID: LIB3180-057-P2-M1-G11
tttgaatggcatatggccaaccncacgctccgggtggtcttctttcccgacgggcagggccttcccaccatcttcacctccctaggactcgagtacgacgacaaagtgctaccctccatcggcaacgaggtgaacaaggacagcaatcataccaactaaatgacctccttagttttttaacttaaccttcttagactattaacgcccgtacttcctctaacttacttataaacattcagaaccctttacaagttatctaaccaataactaatctggttaatcttactta

SEQ ID NO: 30119 - DNA, 228 bp, Zea mays
  Clone ID: LIB3180-057-P2-M1-G12
tcgctcgtggcacccaccccaaaccctcgcgccggctccgagacagccggcgcagccatggccaccaccgccgccgcgtctaccgcgctcactggcgccactaccgctgcgcccaaggcgaggcgccgggcgcacctcctggccacccgccgtgccctcgccgtgcccatcaggtgctcagcggcgtcactcgtcatgccgacggctcccccggtcaccctgttccgc

SEQ ID NO: 30120 - DNA, 348 bp, Zea mays
  Clone ID: LIB3180-057-P2-M1-G5
tgcactggtgttcttatagttccaccaacagtacaccgggcagtaagccaacatatcaggatgcttctgagagagccaagctgctagatgctctccggcactcgcaaacacgtgctagggaagccgagatagctgccaagaaagcgtatgacgagaaggaccatgtcatcaagctactgttccgtcaagcctcacacctcttcgcatgcaagcagtggttgaaaatgctgcagctggaaaacatatgccttcagctcaggttcaaagaacaccagatagcaaccattgttccggaccttccatggatgttggtgaaggaaaaggtagctccgtctcaagagcacaatg

SEQ ID NO: 30121 - DNA, 156 bp, Zea mays
  Clone ID: LIB3180-057-P2-M1-H1
ttctttcaagagagggagccagcgagcagaggcggcgcaacaagggcggcggggggagcacacaccggccaggagcggacgactacctcgacgctgacccagaccctgctgctgcaccaactccagggcagcgccagcaccaagcggggaaggagc

SEQ ID NO: 30122 - DNA, 51 bp, Zea mays
  Clone ID: LIB3180-057-P2-M1-H10
tctcgttttttacgcgtacatcgatccaagcagacgccgttcttgcggggc

SEQ ID NO: 30123 - DNA, 111 bp, Zea mays
  Clone ID: LIB3180-057-P2-M1-H11
tactgcgtttcttttgaaggtgctataaatccacagagatagcttcctcagtaacaaggggagacggccatacactgagaacataagactgccctaagttctcgcaggctc

SEQ ID NO: 30124 - DNA, 400 bp, Zea mays
  unsure at all n locations
  Clone ID: LIB3180-057-P2-M1-H12
ttcgttctctgacgagcagcggtcgatgcgcgccgagggccaatgaaacgcgggagcgagccacaggctattgcttcgttgccttcgctctcctggctctcgctgcgagcgccacctccacgcatacaagcggcggctgcggctgccagccaccgccgccggttcatctaccgccgccggtgcatctgccacctccggttcacctgccacctccggtgcatctcccaccgcnggnccacctgccgccgcccggccacctgccaccgccggtccatgtgccgncgccggttcatctgccgccgccaccatgccactaccctactcaaccgccccggcctcagccttatccccagccacacccatgcccgtgccaacagccgcatccaagcccgtgccagct

SEQ ID NO: 30125 - DNA, 393 bp, Zea mays
  unsure at all n locations
  Clone ID: LIB3180-057-P2-M1-H5
tgcagaattttactggtcatgtgatgccaaacactgaccggccatttaaattgaactgggcatcgtatagcatgggtgaaaagcgatctgaagtggcttctgatcactcgatatttgttggcgatctagctgctgatgtcactgatgaaatgctgctggagcttttctccagcaagtaccgctcggtgaaaggagctaaagttattattgatgcaaacacaggccgttccaggggctatggatttgtcaggtttggagacgacaacgacaaatctcatgccatgtctgaaatgaatggtgtatattgctctacgaggccaattcgtataggacctgcgactcccagaagatcttcaggtgattctggctcctcgactnctggtcattcagatg

SEQ ID NO: 30126 - DNA, 369 bp, Zea mays
  Clone ID: LIB3180-057-P2-M1-H6
tttgggtcttcagaccattagctttatctactccagagcgcagaagaacccgatcgacaccatgagggtgttgctcgttgccctcgctctcctggctctcgctgcgagcgccacctccacgcatacaagcggcggctgcggctgccagccaccgccgccggttcatctaccgccgccggtgcatctgccacctccggttcacctgccacctccggtgcatctcccaccgccggtccacctgccgccgccggtccacctgccaccgccggtccatgtgccgccgccggttcatctgccgccgccaccatgccactaccctactcaaccgccccggcctcagcctcatccccagccacacccatgcccgtg

SEQ ID NO: 30127 - DNA, 442 bp, Zea mays
  Clone ID: LIB3180-057-P2-M1-H7
tttgagcgagtcgaggaacggctcgtctgcctctcccgttctccttcctctcctccccagaagatctgatccatcatcgaggactcgccgggaagaatcaaggatatatagataataaacaaacaaaggttcctccagagcccagaggagggaagtcaccggccgtcggcggggaggagatgtcggacggcgcgggctcccggacgggcgtcgctggcgcgctgggcctctcggtcacctcgtcggtggccatcgtcatctgcaacaagtacctcatcagcactctaggcttcttctttgcgacgacgctgacgagctggcacctcatggtgaccttcttcacgctgtacgttgcgcagcggctgcgcttcttcgagccaaagccgatcgacgcgcggaccgtcatctccttcggcctgctcaacggcatctccattggcct

SEQ ID NO: 30128 - DNA, 435 bp, Zea mays
  Clone ID: LIB3180-057-P2-M1-H8
tgcgacgctgtcctttaccaaggaagagcaatgtcctcaatcgactacctcaaggcacgttcctaccgtggtctaactggagaatacgaaggcccagttcctgattcagtcttggtaggcagaatgggcagggcagctggttacagtgacgagaaaactgagagcgcacagtgaaggtagcattatgcgagttgatcagttgctacaggctccccttttttggcggcgaaaaaccaggagggtgcacaatgattcaatcatgcagcctggatggtttaccaacatgtgtacttttgtttaggtgggcttacaggtttatagacaattgtcaacattttttattgttgagaaatcctgtttctagtcccagggaacaatactttggatgctgttcaatcaggtggctttttgctattaggaacactagtgtgtgcc

SEQ ID NO: 30129 - DNA, 178 bp, Zea mays
  Clone ID: LIB3180-057-P2-M1-H9
tagcttcctcaccgagggcccgcacaatcacgcgagccttcaacaccacgcgagcgcagatcgccgaagccagtccacagagagggagctcgacgcggcagccgaaggcgtacaccacagtcggatgatcccctggagaagagaacggactgtcctccaggaagctgtgcaaccgact

SEQ ID NO: 30130 - DNA, 162 bp, Zea mays
  Clone ID: LIB3180-058-P2-M1-A1
tctgtaggagcaagctagtctcgccctgatctgatattaacaggacataaggagaatgcaaaatttgcgcttgccatgtttcccacaacactctatctcctatcatgaggaaaggacccttttgttccttatgagtgaacttatttacatttatttcgtttt

SEQ ID NO: 30131 - DNA, 358 bp, Zea mays
  Clone ID: LIB3180-058-P2-M1-A10
ttctactctcctgtacaaaaacaaaggaagggacagaagccatgactaggagacaggaacactgccggggcgacggcgacggtggcggtgttgtttctagtagttgttgacgttccttggcattttgtggttgtatgttttttttttttttttgttatttcttatttttttttttttcttatgtatttttttattatatattcatttgtttgtttttctattagctatttttttcaattttttttttatttattttcttttttatttatttatttttttcattcttttttatatctttttcttttttatttgttttttcttatttcttttttattattttatatatttttttttattt

SEQ ID NO: 30132 - DNA, 134 bp, Zea mays
  Clone ID: LIB3180-058-P2-M1-A12
tctaacgatcattcagagaggtctttgtacaaggagcttgttaaagtggggggagcttccgatgtgattatggaggcttttgtttcaatgtatccatttttctccttttgcatttatctgtttaatattttttt

SEQ ID NO: 30133 - DNA, 141 bp, Zea mays
  Clone ID: LIB3180-058-P2-M1-A2
tcgtttccgtcctgtccttccacccggcgggttaaaccctagttctcactccgatgggcgcttcagctccgccgctgcagatggagttctggggtctcgaggccaagcctggttccactgttaagtgtgagcctggatatg

SEQ ID NO: 30134 - DNA, 413 bp, Zea mays
  Clone ID: LIB3180-058-P2-M1-A3
tctttttcccttgatgatgtttatgcaactgctatcataaactgttatccggggggggcctttattctatttctttaaaatatcattttttcatttatcatgtgtctgattcttatgtttttgttcttaactttatcattttacttattttatttatttactataacttatttttttcttattatttaattaataccttattcaatattattatactatttatatttttctttaatttcttatcctttttacatctttttttccctttactactatttttatattctcttcttatattaactttattattacttaatttcattataaatattattttttatttttcattttatttttttttctatttctaccataatatgtacattattttttattctcttattatatctttt

SEQ ID NO: 30135 - DNA, 131 bp, Zea mays
  Clone ID: LIB3180-058-P2-M1-A4
tcaactatttggcagaagaggcagtcagcagtgaggaagtagaggagcaggaagaagaggaagcagtcaaggaagaatcatgagaagaagaggttggagaactataacatcaaattgtagatggtagtttt

SEQ ID NO: 30136 - DNA, 134 bp, Zea mays
  Clone ID: LIB3180-058-P2-M1-A5
ctcagctgcgctagcctccgtcaacccgggccgcgccgcctcctccgcccgcctcgcgctctcgctgccgtgcggcgcgtgggtcggccgaagcgggctcgttcgccgtgcctccaacttattcgtgacacggt

SEQ ID NO: 30137 - DNA, 428 bp, Zea mays
  Clone ID: LIB3180-058-P2-M1-A6
tctgactccttgcgtgctctctctctctcctgttggcgacgactgggtggcaggtgcccaggtcttcttgggacccttcgccggcgacaagcaccaccaggttttgtcatgagtgggcttctcatgagcttccctaagtgatgcttcatatgttttctaacatgtaacatcttccgatgttatccatgtactggatatatccttagaagtcagagatgcagaagtctgatcatcatgagcagaagctaacttcaccaagagggttaatccataagatacttcgtcgtacaaatagcaggcgttcttccactgcagctgatcaacaacctttttctgtatcttcagaaacaagcaactcattaatattctcaatgcaaaaggatgttgatgtgccattaaggattcataatgtttatctcacttactat

SEQ ID NO: 30138 - DNA, 57 bp, Zea mays
  Clone ID: LIB3180-058-P2-M1-A8
acaactataggaaacctctacagcctccaggtaccgaatcgcaattccccccacacc

SEQ ID NO: 30139 - DNA, 213 bp, Zea mays
  Clone ID: LIB3180-058-P2-M1-B1
tcggaaagtgcagattgtaggagatgatcttctcgttaccaactcccaccaggggcggcgaaggccatcaatgagaagacctgcaatgctctcctcttgaaggtgaaccaaatcgggtctgtgaccgagagtatcgaagctgtcaggatgtccaagcgcgccgtatggggagtgattgtaagccacacgattgtttatacaaatgataccttc

SEQ ID NO: 30140 - DNA, 102 bp, Zea mays
  Clone ID: LIB3180-058-P2-M1-B10
tctttctcttgtattctcaaggaaacctttatccatggctcgaggtatcatgctagggctgcttatcatccccctcgtcgtgagaattgaagggagtgtcat

SEQ ID NO: 30141 - DNA, 52 bp, Zea mays
  unsure at all n locations
  Clone ID: LIB3180-058-P2-M1-B11
ttctnctgattcccgtcctttcctttctaaggctcgcgaaccccgacaatgg

SEQ ID NO: 30142 - DNA, 227 bp, Zea mays
  Clone ID: LIB3180-058-P2-M1-B12
tcgcgccgcgccggtgattcggcgcacgggcctgccctgcccggccaggggaggcggtacaacagacatacgcggacagccggacccggacgccatgcgaagtgcaaaccccctaaatattccacttgtcttcccccctcgtatgactccacggaaccattgacttcttggccctcgtcactggaggagtgaatggctacctttaattcaacacgtaaagaaagtaa

SEQ ID NO: 30143 - DNA, 267 bp, Zea mays
  Clone ID: LIB3180-058-P2-M1-B2
tctttctatgtgtccctctgcagcaaaaaccagaggccaccataatcacgggcgctggactcacataccgtttactatctccatggttacattcctttccactttaatcatttcatttttattacaacactatctttatcttttttatataattaatttatattatatatttttttttgttatatttattataattattatattttttttataatataatttatttttaatatttattacttatattttttattattttttaattat

SEQ ID NO: 30144 - DNA, 171 bp, Zea mays
  Clone ID: LIB3180-058-P2-M1-B4
tcggtctccgtcttctgcggttctgccgtttactcttccactttggcctccggtctggcaagtttaagcttcgcctccagccatgggtaaggagaagttttacatcaacattgtggatattggccacttatactctgttatgttttcatccaccttacatctgatctacat

SEQ ID NO: 30145 - DNA, 223 bp, Zea mays
  Clone ID: LIB3180-058-P2-M1-B6
tcttttgcgcgtacgcgtacacagccccgatccgaatcgtcctcctcgcgaggctgggcgatcccccactcccctcccctcgcttcaagatgcagatctttgtgaagaccctcaccggcaagactatcaccctcgaggtggagtcttctgacaccattgacaatgtcaaggctaagatccaggacaaggagggcatccctcctgaccagcagcggcttatttt

SEQ ID NO: 30146 - DNA, 66 bp, Zea mays
  Clone ID: LIB3180-058-P2-M1-B9
gactgactataggtgaaagctgctacagcctccaggtacccgatctccaattcccagcctacgacc

SEQ ID NO: 30147 - DNA, 193 bp, Zea mays
  Clone ID: LIB3180-058-P2-M1-C1
tcgcattacacgcaccaccaaagaggccggagaagaggggatctcggagaagagtcttggcctcgcggcgagacgtgctctgcctagcatatatagccacacgaaagagagtgcttggcctgccggcctttatttagctagctattgctaactagccagcagcagcttgcgtgcgttgaaggcattataggta

SEQ ID NO: 30148 - DNA, 216 bp, Zea mays
  Clone ID: LIB3180-058-P2-M1-C12
tcgggtcttcagaccattagctttatctactccagagcgcagaagaaccgcggcgacaccatgagggtgttgctcgttgccctcgctctcctggctctcgctgcgagcgccaccttcacgcatacaagcggcggctgcggctgccagccaccgccgccggatcatttaccgccgtcggtgcatctgtcaccttcggttcacctgccacctccgttt

SEQ ID NO: 30149 - DNA, 298 bp, Zea mays
  Clone ID: LIB3180-058-P2-M1-C2
tcgcttttttttttttttttaacaaaagtggggttcattcaataattaagggagttgagcagccatgatctggtaacctattacaagcaccaactacccataggggcaaatgaaactctaaacgaggacatagtaattcatcatccatacaaacttggacacagatgttactcgttgacataaccatccttccgcccctcaaacccagggcgcataagttttttctcacgcttttcaatcttgcgcaactttttctgatgtgccctgtcccgtattttcttttttcttttctttttta

SEQ ID NO: 30150 - DNA, 254 bp, Zea mays
  Clone ID: LIB3180-058-P2-M1-C3
tcggttttctcattggcctagatgctcatttgaaactgccatctataactggcgatagccaatacttgccttttcttacatgtatttttcttacatgtcttcattgaagtagccttcctaactgatgtgttactcttcatcaacaagattttgaatgcttttgtaacttgtttcaaaccatgcttgttcctttgacagccattagtcaagatgtattcttattgggagtgaaaagacccacttatcttataacc

SEQ ID NO: 30151 - DNA, 326 bp, Zea mays
  unsure at all n locations
  Clone ID: LIB3180-058-P2-M1-C4
tgcttcaaatacccacagtccacagcaagaaccgaagatgttcggaaacatggtgagagatcccnatcatcggcgacctgacgggcagcaacaagaatgcgcacctcaagggcaacctggtgctcatgcgcaagaccgtgctcggcttcgactgtactagcatcgtcgtctttctcatggacttccttattcttgtttctctaattttattttttttctatttatattctttattctcaaattattaattttttatatttcttattccttttctttataattaagctatttagcttgagtttttttatcataattatttccttttt

SEQ ID NO: 30152 - DNA, 236 bp, Zea mays
  unsure at all n locations
  Clone ID: LIB3180-058-P2-M1-C9
tctattcttttctatgatcgcaagcgaaccggccttttttattaaataaaaaaggggggtntgagaattataaaatataaaatattatttaaataatattttatattatatattattttttaatatatattataaatattattattaaattatttacatattttcaataatacatttcttacatttattatttaataattaattcatttttcatatattattataatttataaatt

SEQ ID NO: 30153 - DNA, 219 bp, Zea mays
  Clone ID: LIB3180-058-P2-M1-D1
tcgggagtacataattttgtggcaacattaattgaaggacgtgaccaaaagaggcggccaactgagttcacaatgaaccaagttcttcagccatttgttagtgagaaggtcaatttcacaaaagttagcccgttggaggtgatcttttgaattcaatgacacttgaaaagaccctgtacaatttttttatggtggtctctgaacttgtttaaattattt

SEQ ID NO: 30154 - DNA, 59 bp, Zea mays
  Clone ID: LIB3180-058-P2-M1-D10
ttctttttgtgaatgagtcccagaccaactggggggggctaccctattatccggggggg

SEQ ID NO: 30155 - DNA, 142 bp, Zea mays
  Clone ID: LIB3180-058-P2-M1-D11
ttctgctggcggagcggaaggcgaaagagaagcaggagcattcttttgccgaggggggggtccccacctacagcttgccaccattgttagaggatataaaaattatctctttaaactaattattcctatattttatattctt

SEQ ID NO: 30156 - DNA, 285 bp, Zea mays
  Clone ID: LIB3180-058-P2-M1-D12
tctatctttttccagagcgtggaaaggagaagctactttgaagctaccactggatcgtggcatgtgacttgttgaataattggttgcaggagtagagtgcgccggttataacttataaagcagagcatgccgtgttgatactgagttatttgtaggcttgacctatattaatagatggtttctttgttattattgtttttctagatttatttttattattcctttcttatatttttttttatcacttcttattttcttatattatttatataattctttcatatt

SEQ ID NO: 30157 - DNA, 272 bp, Zea mays
  Clone ID: LIB3180-058-P2-M1-D3
tctgatttagcagctcatttctaagaagccgacccaggccagccgatatcgagcacgaacgacacaccccattgacgtacagctatgatgcggccgacgtcgacccttgctatggtcgtgccgtcgctcgctgtagccatcctctgcatcctagtccggtccgcctccgcggagttctggctcgacgagatcaccacggacggtgacttacgtagagactacaaccgttctggccggtaggagtgtgtttttgttctagatcagtgtttttg

SEQ ID NO: 30158 - DNA, 112 bp, Zea mays
  Clone ID: LIB3180-058-P2-M1-D5
ttgtatagatcttcccagcattgagaacttcattcttgaaggcattccgtgtgatggagtatgatctcaaattacataaaaacatttactgcttttatagtggtactacatc

SEQ ID NO: 30159 - DNA, 119 bp, Zea mays
  unsure at all n locations
  Clone ID: LIB3180-058-P2-M1-D8
cctagacctatgcgatcgtcccgtcatctatcacaantcagagcccagtccatcctgatatggctgcgcgggcgcacacatctcaactcccatgacacaatatcatagatccgcgatca

SEQ ID NO: 30160 - DNA, 246 bp, Zea mays
  Clone ID: LIB3180-058-P2-M1-D9
aagggaaagcgtcagaccgacatgcattaccgcctctgacctgttaaccgaaaaactttttgttctcctgccatccggctcgtgagggcaccatgattcatatagcaccggtggtgctactttcttaccctgattagatcgtgtatcgtacaactattgtaattatggaccctcttagccattgaatttatatgtagtagtttatcttctaatgaattactcattttttctccttctctttctttt

SEQ ID NO: 30161 - DNA, 372 bp, Zea mays
  unsure at all n locations
  Clone ID: LIB3180-058-P2-M1-E11
tctatcttagttgttgtctgccgtgatttgagccgtgcttacagattgatccgtgggacgaaaaaatcatatttttattatgatcctttaaccattaatatctttcatttttatttttatttatattctatttatatttttttattttttataattcacataanttttatattactttattattttttacttattaatatatctattatttatatttatcttctatatttatttttttctttattttttttttttaatattttatttatattatttttatatctatttttattatatcttatttcttctaattttctaactttaattcttatatagttaattattattaattttataatattatatatttat

SEQ ID NO: 30162 - DNA, 173 bp, Zea mays
  Clone ID: LIB3180-058-P2-M1-E12
tctttctcaagtagagaacctcaagtcagctctgagcgtgatgcccatgtgggcaggcatggtgatgtcgttcctgctgcagagctcctcgttcggggtcctgcaggcagccaccatggaccgccgcgtctgctcaacaaggttccagatacccgcggtcttgttcttgttct

SEQ ID NO: 30163 - DNA, 154 bp, Zea mays
  Clone ID: LIB3180-058-P2-M1-E2
tcttgctgtcctgaccggcgacgattgggcggccgtctctgtctccttactcgaggggtccagctcttcttcgtgccatttgccggccgcgagcaccaccagacgggatgagcaacccgggggcaccggtcaccgtcactgagttggtggagct

SEQ ID NO: 30164 - DNA, 97 bp, Zea mays
  unsure at all n locations
  Clone ID: LIB3180-058-P2-M1-E3
acgttgcnctcattgatcctatcatatctctgggcgagcctgaaatgggtggtacgaatgagcctactatggatcatttatatcatattcctcttaa

SEQ ID NO: 30165 - DNA, 443 bp, Zea mays
  Clone ID: LIB3180-058-P2-M1-F10
ttctatcgttcctgtcactgtcagccatctgacgagggaaaaaaaaaaacagggaacgtatgactgccgctgccgttcgatttgagagccaccgattaacccatccatccaccttgccgccgtctgagagtatggttgagctgtcttacactttttgtttttttttatctatattttatatttctttgcttttatattttacttatttttctttttattttttttctttctttttttcttacttttattttatttcttattaatatttttcttattctcttctttcgtcttttttttttattttttttacttttctcttctcctttctcattattttcttctttaatattttttctttatttttttattttttctatctttcttcttattttctttccttctttttattttttacatcttattctctatcctcttcttttttt

SEQ ID NO: 30166 - DNA, 196 bp, Zea mays
  Clone ID: LIB3180-058-P2-M1-F11
tctttctagtcatcagtgtgaggaaactgctgccggactaatcaaaaacacgacccgcctttgcaattgtattcggccaagctattgcaaggttagcaagagcttttatagctctctgctgtagatttggcaaacctgaagaaagaacttgaataagaggagtaatcgcctgctctgttattgtgtccttttggag

SEQ ID NO: 30167 - DNA, 159 bp, Zea mays
  Clone ID: LIB3180-058-P2-M1-F12
tcgaccgcgtgctcaaaccggggggactctacgtctcctactagtgggggaggaccccgttgtaccgagccgaggaccccgaccacgttgagtgcatacacggcatctagcgcggcgacgcgctccctgggctacaccgtcaggacgtgatcgcgacca

SEQ ID NO: 30168 - DNA, 84 bp, Zea mays
  Clone ID: LIB3180-058-P2-M1-F2
tgagcttatcaaacaagtagcgacagctggacaaagatttgtgagagtgagggggggcttataagagatggctaagatcgccgc

SEQ ID NO: 30169 - DNA, 145 bp, Zea mays
  unsure at all n locations
  Clone ID: LIB3180-058-P2-M1-F3
tcgctttctattgctgaacaccctatcttaccagagaggatgacgaaacgcgcggtgtgctaattaaaggtctcattgnaaggcctccttctcgctgttttttatacagtatgtgttatcgattcgtatctctttttttaaccaa

SEQ ID NO: 30170 - DNA, 119 bp, Zea mays
  Clone ID: LIB3180-058-P2-M1-F4
acctaagcatagcaatcggaattctctgcgatgtcggtagatctcgactagcccccgactagttttgattcctcctttcgttcgagagagcgattctggtggcaatggcgaatagcgag

SEQ ID NO: 30171 - DNA, 167 bp, Zea mays
  Clone ID: LIB3180-058-P2-M1-F5
tgaccaactagcaacatagaaagcacaataggggaccaacaatggcagggaaagtattttgcttccttatgctccttggtctttctgcaagtgttgctaccgtaaccattttcccacaatgctcacaagctcctatagctttcctttttcccacatacctcttacca

SEQ ID NO: 30172 - DNA, 55 bp, Zea mays
  Clone ID: LIB3180-058-P2-M1-F7
agggaaagctgaacgcctcgcagctaccgttccgcaattcccagttccacccaca

SEQ ID NO: 30173 - DNA, 377 bp, Zea mays
  Clone ID: LIB3180-058-P2-M1-G1
tcggaaagtggaatccagtagcaacaatagagcaacaatggagaccaagatatggtccctccttatgctccttgctctttctacatgtgttgctaacgcgacaattttccctcaatgctcacaagctcctatagcttccctttttcccccataccttccatcaattatagcttcagtatgtgaaaacccagctcttcaaccatataggcttcaacaagcaatcgcagcaagcaacatacctttatcgcccttgttgtgtcaacaatcgccagccctatctttggcgcagtcattggtacaaaccattagggcacaacagttgcagcaactcgtgctacctgtgatcaaccaagtagctctgggaaacctttctccct

SEQ ID NO: 30174 - DNA, 61 bp, Zea mays
  Clone ID: LIB3180-058-P2-M1-G10
ttcgttctctgaaattcggtgattccttgcgtgagggaaaaataaaaaaaaagaggatggg

SEQ ID NO: 30175 - DNA, 259 bp, Zea mays
  Clone ID: LIB3180-058-P2-M1-G11
ttcgttcggaccaagctcaccaagtctcaggccgacgtacatcagcgtgccgggcgagggtccctacaagcctgcccactaccggtactaggcacacggcttgcagctcactcgggccgttgtgtgctatgaagttcgctacactggcctgtcagttatcttttgcatgcatatgcattatcatatacgcagtcgcgtagcaggttttcttatggttatcgcttgagctgatgggggtgtgaagttatatttttcttta

SEQ ID NO: 30176 - DNA, 391 bp, Zea mays
  unsure at all n locations
  Clone ID: LIB3180-058-P2-M1-G12
tcggagcattcagaaacacaccaagcgaaggacattagcaacaacctaacaacaatggctaccaagatattatccctccttgcgcttcttgcgctttttgcgagcgcaacaaatgcgttcattattccacaatgctcacttgctccaagttccattattacacagntcctcccaccagttacttcaatgggcttcgaacacccagctgtgcaagcctataggctacaacaagcaattgcggcgagcgtcttacaacaaccaatttcccagttgcaacaacaatccttggcacatctaacaatacaaaccattgcaacgcaacagcaacaacaattcctaccagcactgagccacctagccatggtgaaccctgccggctacttgcaacagc

SEQ ID NO: 30177 - DNA, 184 bp, Zea mays
  Clone ID: LIB3180-058-P2-M1-G2
actgattattgcccttgctagcttaccacaggcaggctctttgctctcaaggtatgtcgggggctttggaactgcaaacaacatgcctggaaatttccctctgaaccaaagtacaacgtcggcaaccgcaactcttgggtttgatggaacggtcccgtcacatttggaagatggaaaccagttc

SEQ ID NO: 30178 - DNA, 87 bp, Zea mays
  unsure at all n locations
  Clone ID: LIB3180-058-P2-M1-G3
nactcatgtattcaagcaaccctacttgtcttgcgaaaattctaagaatatatgagctgtgggtaaactatgaattgcaaggataca

SEQ ID NO: 30179 - DNA, 150 bp, Zea mays
  Clone ID: LIB3180-058-P2-M1-G4
tctgttataagtattatgtatcgaaccagctgatgggattttgctccttccaaggcgggcagggtttatgtatcgaaccagtttatgggatcttgctcctattccaatgcatccatggtttgtgaatctaaaaaattaaattaaaactat

SEQ ID NO: 30180 - DNA, 207 bp, Zea mays
  Clone ID: LIB3180-058-P2-M1-G6
tagggaaagctgagacgcctgcacgtaccgtaccggaattccatttccgacccacccctttcgtatctgttcaatcaaaaacacaccaagcgaagcgacattaacaacaaccggggcagggcgttactaccaatatataatcccttcttgcgctacttacgcttttttccatgtgcaacaaaatcctttcattatttcacaattctt

SEQ ID NO: 30181 - DNA, 120 bp, Zea mays
  Clone ID: LIB3180-058-P2-M1-G7
gaaaagaaaaagaaaaaaaaaggggagggaaaaaaggggaaggggcgggggaaaaaaaaaaaaaaaaaacaaaacgaaagaaaaaaaacaaacaaaaaaaagaaaaaaagaagaagaacg

SEQ ID NO: 30182 - DNA, 246 bp, Zea mays
  Clone ID: LIB3180-058-P2-M1-G9
ttctttcttcccaacctgttctgagccagccggccatggcgattagggctgggcgcgggcccctactccaccttctcgccctcaccttcctcatcctcgccgcctctccctgcctccaagcttgagtggaccatcgcaaacagatatcttactggactgggcaacccaactttgacctgcagaatgtctcatcgggtcgaaaggatgtccctcatctcctgggtagatcaaaggtaataacacaca

SEQ ID NO: 30183 - DNA, 384 bp, Zea mays
  Clone ID: LIB3180-058-P2-M1-H1
aattaactagtgcgtggtctggtctccatctcgatcagagagctccgtgcgtcactttcccctcgttccattcatggagaatatgctccacctagccccgtcgtcccaggcccaggcattggccttggaccgctcctccgtcttctcgcgtgagcacgtgccgccggccgtctccgctgtcacctccctgccagttatcgacatgtctcgcagccgcgacgaggtccgccgcgctatcctcgacgccggcatggagtttggctttttcctggaggtggagcacggtatactatagtaggttatttttcgtcatatttctattttttgatttgcttttcaacttttaatcttttagtatttctttcatttacttttttttctgat

SEQ ID NO: 30184 - DNA, 181 bp, Zea mays
  Clone ID: LIB3180-058-P2-M1-H10
tcggagaagctctgccaacttttagagcagaatccaaaacttatgcaaatgctccaggatcgcattggccagttgtagtcgcactggaggtgctattgtgaaagtgaaatctgatgctggtcgatcgctaggttcctagagtatggcgttgttttccttttataattttcatctccttttt

SEQ ID NO: 30185 - DNA, 123 bp, Zea mays
  Clone ID: LIB3180-058-P2-M1-H11
tcggccaagttcgtgttcgagtcgtacgtggcgatgaagatgttcggcaacgtgggcaccgccgctacttcaacttcagctttctgggcgagcgggagttctacgagcggcggcgcttttttc

SEQ ID NO: 30186 - DNA, 169 bp, Zea mays
  Clone ID: LIB3180-058-P2-M1-H2
ggctagcgtctagcgaccaagccattccggattcgggaattcccagttgagctcatcgcggcgactcgccctctcgagtttcttgcaaaaagttacggccgctgctccgctcgccattgctgccgtgtggagcggccatggagctctgctgctcaggcgtcctaagcgg

SEQ ID NO: 30187 - DNA, 392 bp, Zea mays
  Clone ID: LIB3180-058-P2-M1-H3
tcgtttttctcgagcactagacagtgcacagtgcagggtccggtgtacactggattgtgccgtgaggcaccattgtgcccagatagagatgattttgaaaatccttttccggattgcacactaaacctaatcccaacttataagcacacaaaagaacacctgttgggacaggtatatgcaccctcacatattctctcatacttttcaaaatattttgccataggctatgtagtttttaggaaaatagtcaaattgtgagaattttcatttgagagttacactaggggtttcatgaatgaattgagtggttcatcacctacataatcaagatttttaagttgctcctttggagccgtttgtcttataaaaccccacatcatttttttcttcta

SEQ ID NO: 30188 - DNA, 54 bp, Zea mays
  Clone ID: LIB3180-058-P2-M1-H7
aaaaaagaaggagaaaaaacaaagggggagaaaaaaaaagaaagagcgacggat

SEQ ID NO: 30189 - DNA, 424 bp, Zea mays
  Clone ID: LIB3180-058-P2-M1-H8
tcgatgtgaaaacccaattcttcaaccctacaggatccaacaggcagggacaggtggcatcttacctttatcacccttgttcctccaacaatcatcagccctattacatcagttacctttggtgcatttattggcacaaaacatcagggcacaacaactacaacaacttgtgctagcaaaccttgctgcctactctcagcaacagcagtttcttccattcaaccaactagctgcattgaactctgcttcttatttgcaacaacaacaactaccattcagccagctacctgctgcctacccccagcaatttcttccattcaaccaactggcagcattgaactctcctgcttatttacagcagcaacaactactaccattcagccagctagctggtgtgagccctgctaccttcttgatacaacca

SEQ ID NO: 30190 - DNA, 274 bp, Zea mays
  Clone ID: LIB3180-058-P2-M1-H9
tttcttctacatgactgatgcaatcacccgagcttcaaagatcatgggccagggcagtgcaaccttgctgaagaagttaggtttttcacactatctatctaatcttctttaaacagatttttagttactttactttttttttcttattattctagagtttttcatttcctttttctttttttttatccttttttttcttacttctctttctttattttattttattttttattctattattatatttttatctaatttctcttatttatatttt

SEQ ID NO: 30191 - DNA, 346 bp, Zea mays
  Clone ID: LIB3180-059-P2-M1-A1
cttagaggtgggttggcttctcctccccctccggttcggtttcgggttcgggaggttttcctgggttcggttttgtgtttttcgttttcttgttgttatcttttcttctttctttcgttgctttgtctcttttttttttttttctttcttttcttcctttcttctttttttttcttctttctttttttatttcatctttttttctttttttcttttttcttcattcttttttttactttctctttttttcttctcttcttcttttctccttctttctttttgtttttctttttttattctcgttttatttccttttacttttctgtttttttatctgtcgtttttt

SEQ ID NO: 30192 - DNA, 270 bp, Zea mays
  Clone ID: LIB3180-059-P2-M1-A10
tctatcaagatcgggatcaatgggttcggcaggatcggaaggctggtgggcagggtggccctgcagagtgactatgtctatctcttccccttgaacgaccctttcatcagcacttacttcattacctacattttctagtacatatcttttctctgacagtggtagctccattatatattggttaattactttaattcctgtttcttttgtttgatgattcttttcatttttttattaatttattttttgatttgatacttttcttttttt

SEQ ID NO: 30193 - DNA, 195 bp, Zea mays
  Clone ID: LIB3180-059-P2-M1-A11
tctcgttcaatgacggcgcctacaacgccctccaggtctcccccggccacttcgacgagcgcgtcttcaaggcgctggaccgggtggtcgtggaggccgggcggcacggggtgcggctgatcctgagcctggcgaacaacctggaggcgtacggtggcatgacgcagtacgtgcggtgggcgtgggaagagggcg

SEQ ID NO: 30194 - DNA, 341 bp, Zea mays
  Clone ID: LIB3180-059-P2-M1-A12
tcgcggacgcgtgggccgttctctccgtttttccccttcgcgtatcttgggccgccgcaacccttcacgtatcgtctctctctcacacggtcacaccctgacctcccccctccccctcccagaaaagacccctcgaaaaacggcggcgctgcgacatggcggaggtcgaggctccagctactgcggtcgaggctccagctgctgcggtagcgacgactacccctgaggtggcggcgcccgaggccggagccgttactgaggcgaagggttcgcacatgctttaccggctgaggaccttctggtacgacatccatacgaagtccaagttctgggctgcttgg

SEQ ID NO: 30195 - DNA, 174 bp, Zea mays
  Clone ID: LIB3180-059-P2-M1-A2
tcggctttcaccggagagctagccgcggcctccatgctcgcggtgatctgaacgggaggcgctgcccaatcgcgccgactactgaggcgcccactcctcatatcccatttccatcactcgtttctccattttccaccttcctaaacgccacttaaaagagaaaggagagcatcg

SEQ ID NO: 30196 - DNA, 215 bp, Zea mays
  Clone ID: LIB3180-059-P2-M1-A4
tctggtcataggtgcgtcaagcctccgatcatctacggggacgtgagccggcccggccggatgaccgttttctggttgaagacggcacaaagcatgacgtctcgtccaatgaatgggatgctgactggcccagtcacaattcttaactggtccttcgttcggaatgaccatccgaggtttgagacttgctaccagatcgcttttgcgatcaagaa

SEQ ID NO: 30197 - DNA, 287 bp, Zea mays
  Clone ID: LIB3180-059-P2-M1-A5
attaaggctgtgaggcagatgattatggctcccacagttgagctgaggcagcaggcgctggatcgccttctgccttaccagaggtctgacttcgaaggcatcttccgtgctatggatggactttcagtgactattcgacttctggaccctccccttcacgagttccttccagaagggaacgtcgtggaaatcgtgcgtgaactgtgttctgagacgggagccaaccaggatgatgccctcgcacggatcgaaaagctttcggaagtaaaccctgtgcttggcttccg

SEQ ID NO: 30198 - DNA, 75 bp, Zea mays
  Clone ID: LIB3180-059-P2-M1-A6
ttgttttcattggaacctctatgatccaaggaaagggttacttcaacaacgagggcgcaccaaccatcactttac

SEQ ID NO: 30199 - DNA, 89 bp, Zea mays
  Clone ID: LIB3180-059-P2-M1-A8
tgtagatgtttactttcactggtctgaatagcgaactagtcaaatggatgaggcgaggaataccacatttatatgacatctgatgggag

SEQ ID NO: 30200 - DNA, 352 bp, Zea mays
  Clone ID: LIB3180-059-P2-M1-A9
tcgcgccttctccttctcccccctagtctagaggcgtttgctccccaatcccttcggcccgcccgctcgacgtgatcccaccggcagccatggatccatacaagcaccgcccgtctagtgggagcaactccagcttctggaccaccaactccggcgcccccgtctggaacaacaactctgccctcaccgtcggacagcgaggtccaatcctccttgaggattatcatctaatcgaaaagcttgctcagttcgacagagaacgtatccctgaacgtgttgtgcatgcacggggagccagtgccaagggtttctttgaggtcactcatgatggctttcaccttacatgtgctga

SEQ ID NO: 30201 - DNA, 354 bp, Zea mays
  Clone ID: LIB3180-059-P2-M1-B1
gcgtgttgcggcggagcacggaggcgaaggaggaggagcagcagcagcaggcggcgccgaggagcggcatcccactcagtgcttgcaaccatggctaggggattgaagaagcacttgaagaggctcaatgcgcccaagcattggatgctcgacaagcttggcggagcttttgctcccaagccatcttctggacctcacaagtccagggagtgccttcctctgatcctcatcatcaggaacaggctcaagtatgctctgaactaccgtgaggtcatttctatcctgatgcaacgccatgtacttgttgatggcaaggtcaggactgacaagacctaccctgctgggttcatggat

SEQ ID NO: 30202 - DNA, 270 bp, Zea mays
  Clone ID: LIB3180-059-P2-M1-B10
tgcttcctgagtaagtactcaaagcatcctttttcagaaaaggatgcaattaacagatagtgttttttgttgtagaagactaccattgtttcgctgctattcttactgtaaaacaacttgcgtttctcatgtgaatcattaatctttccgtcgagttttactctacttagaccttacctggtgcagagcattattccatcatttgttctgttagtgttccctttattgttttattactccttttttcacttcattcttacttctcttctt

SEQ ID NO: 30203 - DNA, 70 bp, Zea mays
  unsure at all n locations
  Clone ID: LIB3180-059-P2-M1-B11
tgntttttcgcaagacagatccttgttgtcctacagcattttctggctgccggccaaggccacctggtac

SEQ ID NO: 30204 - DNA, 394 bp, Zea mays
  Clone ID: LIB3180-059-P2-M1-B12
tcagcacgccatcgcctacgaagacaaggacggcgacctcatgctcgccggagacgtgccctgggatatgttcatctcttcgtgcaagaagctcaggataatgaagggctctgcctctgaggccaggtgatcgctgatccatacataaacagaggctacagacacgccacctgggaacgcggatccaagagcacacacggatcgtacttgacgaggaaggagggaggagcagtgtggcttgagctctccagtgttgtacaaagacatgtttctttctgaacccaaaagggagaaagatgtatgaagcgtgtatataagatcttagctaagcagttgttttcatttgtatgagcgatcgaaagctggaaaaattgtaaaagaaataaaggaaagg

SEQ ID NO: 30205 - DNA, 151 bp, Zea mays
  Clone ID: LIB3180-059-P2-M1-B2
tcggtgtcctttccgcatcctcttttttatcagttaggacttggctcctggtaggtgcggtcggaggctccatgcttcttgctgtatctgtatttccttagaagagattctttacctgctcttataaataataaaacaaatatttttattt

SEQ ID NO: 30206 - DNA, 294 bp, Zea mays
  Clone ID: LIB3180-059-P2-M1-B3
cgtttcgtcgccgccgcgcgcctcggagaagagatagaggcggccgctgggtcgaccccgcgccacctccgcctgcctcccccggcaccgatcgggtttgatcgatggcgtcgaagaggatcctgaaggagttgaaggacctgcagaaggacccgcccacctcctgcagcgcaggtcctgttggtgaggacattgtccattggcatgcgtccatcatggggccttctgtcagtccatttgctggtggggtttttttgttgaacatttcacttctctcccggattaccctttttc

SEQ ID NO: 30207 - DNA, 379 bp, Zea mays
  Clone ID: LIB3180-059-P2-M1-B6
ttcttctagcaacatagaaagcacaatagtgtaccaacaatggcagccaaaatattttgcctccttatgctccttggtctttctgcaagtgctgctacggcgaccattttcccgcaatgctcgcaagctcctatagcttcccttcttcccccgtacctctcaccagcggtgtcttcggtatgtgaaaacccaattcttcaaccctacaggatccaacaggcaatcgcagctggcatcttacctttatcacccttgttccttcaacaatcatcagccctattacaacagttacctttggtgcatttattggcacaaaacatcaaggcacatcaactacaacatcttgtgctagcaaaccttgctgcctactctcagcaac

SEQ ID NO: 30208 - DNA, 367 bp, Zea mays
  Clone ID: LIB3180-059-P2-M1-B7
tttcacgcgtatacatatatatatgtctgagaggccaagcaagtcaaccaagagagagagagagaaaatgcaagcgcgttagcctaaaaatgtccacagatcactgcttacacgccacgtaatatgacgtaacagcgcaagcagcagatctagggcacgcacacgcaagagctccgagaaggacgacaagaagccggctagctaggctgacaggcgatctgtaccttcgatccctgtctgtgacgacgccttcttccagcgaagcgttggtgatatcgcatgcaggaaacgatcacgcacgcacgcacgcagctggctaggctaggctagctagcatgaggcgggagagcaggcatggcgagatctc

SEQ ID NO: 30209 - DNA, 173 bp, Zea mays
  Clone ID: LIB3180-059-P2-M1-B8
tctcgagctcctgagcttcttgatcgagatgacggccgtcatctttgggatgagggacgagcatggcgatggctacctggtggacaaggtccttgacaagaccgggatgaaagggacagggtagtggacggcgctgcattgctccctagcttgtgctcgcactctctatcatt

SEQ ID NO: 30210 - DNA, 201 bp, Zea mays
  Clone ID: LIB3180-059-P2-M1-B9
tcgtgccgtcacagatgttgaaggagatcacaccttgattgctggtgaggagggtatccattctgacatgatactagggtctgaaaagattgaggctcctgtatagtttcgaggaattggacacatggttaatccatcaaacagtttgtttctgaaggatttaatattcttttcattagatatttatatatccaatatact

SEQ ID NO: 30211 - DNA, 312 bp, Zea mays
  Clone ID: LIB3180-059-P2-M1-C1
gtgttgccagacactccgtagtctgtaccccaagcaccggcgcggcggcggcggctaccatggcagtcgggaagaacaagaggatctccaagggaaagaagggtggtaagaaaaagaccgtcgatcccttctctaagaaggactggtatgacatcaaggccccatcggtcttcagtgtgcgcaacattgggaagactctcgtgtccaggacacagggtaccaggattgcctctgatggtctgaagcacagagtctttgaggtttgtctagctgatcttcagggtgacgaggatcaggctttcaggaaaatca

SEQ ID NO: 30212 - DNA, 123 bp, Zea mays
  Clone ID: LIB3180-059-P2-M1-C10
ttgtctttccctcttcaagaggggatcatcagatggggcttattattccttaggactccaggctaggatcggagttgctctaaattgactgaaccatggcgtcgacaatggcagttacgacta

SEQ ID NO: 30213 - DNA, 76 bp, Zea mays
  Clone ID: LIB3180-059-P2-M1-C12
ttgttctgtcgccgtgcagctccccctggtaccttcctccaactactctgcggcgttacctttaccgtaccgcgtg

SEQ ID NO: 30214 - DNA, 272 bp, Zea mays
  Clone ID: LIB3180-059-P2-M1-C2
cacctcctcgcctgcgatctccgtagcctccgtcgcgtctagcatcgatgatgggggcctactgcggaaagtacaaggatgagctcatcaagaatgctgcctacattggcacccctggcaagggtatccttgctgctgatgagtccactggcaccattggcaagcgcctttccagcatcaatgtcgagaacgttgaggagaaccgccgtgccctccgagagctcctaatctgttgtcctggagctcttcagttcattatctgagtgattctt

SEQ ID NO: 30215 - DNA, 417 bp, Zea mays
  Clone ID: LIB3180-059-P2-M1-C3
tcttttaattctagcagcactgcacaggatgctgagaagaaaggtaccaacgaaagtggttatgcagagaaaaaggaagatgctcctgctcctcccgagagcatggcctccaagaagaagaaaaagaaggacaagagttcaaaggagggaaaagaaacacatgaagcacttgatgggtcagaggagactgccagtgcatgacctgatgaagattcttctgctgtggatgttaaggatctcttgatgtaatatctcttctttttcattaatattcacttcttctatattgtcttttctctttttttcatctttttttctcttatttttatttcttctattctaatctgtttagtttgattctttctcatattattactcttcatattcttttctcatctcttccctttatttcctttt

SEQ ID NO: 30216 - DNA, 215 bp, Zea mays
  Clone ID: LIB3180-059-P2-M1-C6
tccgtgcaatgctttgtgcgcatggttgatttctctgtggcaaacttcccgtcctgcatggggttgtaagctgtctctaaatttcacggcaagtcgtgtgcctgaaccttcatcttaagttgttgtcgtatcccttcgtcttgtttcggttgcaccccgtgatggtatggattggttgctgaccacttgatctatctattctgcattttcctttg

SEQ ID NO: 30217 - DNA, 415 bp, Zea mays
  Clone ID: LIB3180-059-P2-M1-C7
tcggcttcctcctccgcgcttccttcgccgaggcgtaagcgtcagcgagggcgtataaatcgctcccctccgcacattcgccaccgcctctccgctcctcgacaagaccaatggcggctgctgcgtcctctgctctgcacgccgttggcgccgtcgcctccgccaagcctagatccgtcgtccccgcggtggcgacgaggaggagcgtgcgcgtggcgcccgcggccaagcgaggaccaggctcgggaggaggcaggctcgtggctcgcagcgccgttgcagccaaggcggatgaggcggccgctgctgccggatccaagtcaggcggccatgagttgctgatgtttgaggcccttccggaagccttgatagaagagatgaatttggatccaacagtgtgcgtcatgagtgaaga

SEQ ID NO: 30218 - DNA, 160 bp, Zea mays
  Clone ID: LIB3180-059-P2-M1-C8
tgtccatgacgaccctcgccgcgctgctggttctggttgccgattgcaagaggggtcaaggccgtggagttccacatctttgtagccaccccgctgtctccccacttgtacaccgctccgtccttggacgcggacgaggatgtcttcggcggcagccttg

SEQ ID NO: 30219 - DNA, 159 bp, Zea mays
  Clone ID: LIB3180-059-P2-M1-C9
tgttttttcagagtggccaaacctgagcgagtttgcggagagtatgcagggtggtgagctccctcaagatgctgcgtttgaagcggtatcccagaattactgtccttccaggatatctggtcgacctcgcttctttcaaaatactattcattagcattt

SEQ ID NO: 30220 - DNA, 286 bp, Zea mays
  Clone ID: LIB3180-059-P2-M1-D1
tggttgccagcccttttttttttttttttttttttttttttttttttttttttttttttttttttttttttttttttttttttttttttttttttttttttttttttcatttttttttttttaaattttttttttttatattggatttttttttttttttttttttttttttttgttattttttggatttttttaatattttggatttggttatgtatttttttattttttaaatattggttatttttttaatttaattttttatggagaagaaaaaatatttttt

SEQ ID NO: 30221 - DNA, 408 bp, Zea mays
  Clone ID: LIB3180-059-P2-M1-D10
tctttttggaccgagcaaatgaaatctacaagaaagttgaagatctcaaatctatcaggggaagaaatcaagatgccatattagctgcatgcctatatattgcttgtagacaagaagatcggcctagaactgtgaaagaaatatgttcagttgctaatggggccacaaagaaagaaattggcagagcaaaagaatttatagtgaaacaactggaagttgagatggggcaatctatggagatgggaaccattcacgctggaaattttctgagacgtttctgctcaactcttgggatgaacaatcaagctgttagggcagcccatgatgcagttaagcactcggaggagcttgatataaggaggagccctatctcaattgcagccgctgtcatttatatgataacccaac

SEQ ID NO: 30222 - DNA, 395 bp, Zea mays
  Clone ID: LIB3180-059-P2-M1-D11
tcttctgcatctgcgtacacggtctccctcttcctgtcagtagtagagtgagagtgaggcagcgagtgggagacaaggggaaatggggaagggagcgcaagggagcgatgcggcggcggcgggcggcgaggtggaggagaacatggcggcgtggctggttgccaagaacaccctcaagatcatgcccttcaagctcccgcccgtcggcccttatgatgtccgcgtgcgcatgaaggcagtggggatttgcggcagcgatgtgcactacctaagggagatgcgcatcgcgcacttcgtggtgaaagagccgatggtgatcgggcacgagtgcgcgggcgtagtcaaggaagtgggcgcccgcgtgacgcacctgtccgtgggcgaccgcgtggcgc

SEQ ID NO: 30223 - DNA, 426 bp, Zea mays
  unsure at all n locations
  Clone ID: LIB3180-059-P2-M1-D2
ttttcttaagctcaatcaattcactcaaacctgttccccaaatcttcgattagattctcgttgacaagaagactagaaccgaacctgaccatgtcgctgatccgccgcagcaacgtgttcgatcccttctccctcgacctctgggacccctttgagggcttccccttcggctccggcagcagcagcagtctcttccnctcgttcccgcggaccagctcggagaccgcggccttcgctggcgcgcggatcgactggaaggagactccagaggcgcacgtgttcaatgcagacgtaccggggctgaagaaggaggaggtcaaggtggaggtcgaggacggcaacgtccttcagatcagcggcgagcgcaacaaggagcaggaggagaagacggacacctggcaccgcgtggagcggagcagcgggaga

SEQ ID NO: 30224 - DNA, 419 bp, Zea mays
  unsure at all n locations
  Clone ID: LIB3180-059-P2-M1-D3
tttcttctcccctcttcccgacgccgcacgccttcactgtcctcggcagccgatcttccagagcggttcgacaccgtgctcgccacggtcgacatcactgccgccgccgccggaaagttggcatcgttgtcgacctctttctccccttcttccacccaggaggcaacatgtcgtcgctcgccgctgcgagagcggataacttctactatccgccggaatggagccccaaagaaggtgggctgaacaagttccatggccagcatgcgctcatggagcgagcgaggaagctcgaccagagcatcctgattataaggtttgagatgccttttaacatttggtgtggtggatgcaattncatgatagcgaagggagtaagatttaatgctgagaagaaacaagttgggaaatattactctacc

SEQ ID NO: 30225 - DNA, 217 bp, Zea mays
  Clone ID: LIB3180-059-P2-M1-D4
ttactttttgtttggaagtaaggataccgccggagaggagctgaaaccccttgctattcaattttgaatataaggggattttagctccttaaatcccgtcgggtataattgcttccaaaagccataactgtgtgtgtcgtaccaacagtcctatggagtcttactagttactaccgctgtaccttctgaaaaaaaaaaaaaaaaaaaaaaaaaacag

SEQ ID NO: 30226 - DNA, 413 bp, Zea mays
  Clone ID: LIB3180-059-P2-M1-D7
ttcttctgaatccctcctagagcaaaagtcctaaaggcctcaattagattagacaaaaaagacgcgattggatcactggcgagggaggcgtgtttaggggggtggcgaccgaagttagccgccgagctcggcagcgttttgcgtgattgattgcgtccctaatcctcactctttatgcttcgttcgctttgtccctttcatcatcccctgtgcttgtctcgcccgctctctctcgccttccacaaccctctccctcttccatctcatttccgctgcggctgcaacaataaaataataagtctcgtgcaggcgaaggacgtacgacgacgcggacgcaccgtcgaagtctacaggctgcgcaatccctttctccctcttatccccaaagcgaggagctgagggggggcccttct

SEQ ID NO: 30227 - DNA, 400 bp, Zea mays
  unsure at all n locations
  Clone ID: LIB3180-059-P2-M1-D8
tctcgttttttccatgggtcggtcagtgcataggactggtgataactccagtgcacaagaatccgctgaacagggtggcgttgagctgtatgaagaggtgaacaaccgtgggctctgcgctattgcccaggctgagtcgtatgttataaggttctcggaggactcgccatgagaaggttacgctcttagttaccccaggcctgtgttcgaaggttcaatgttttaactcccgtagcaacgcacgagcacatacctatattattgaatccactatagactntctggagctggctcttcagtttggcatgatcatgatgtttgcctgtgcatttccattgatattctgctttgcagctctgaacaatgttactgaaatcagagcagatgcattgaagttgtt

SEQ ID NO: 30228 - DNA, 329 bp, Zea mays
  Clone ID: LIB3180-059-P2-M1-D9
ttcgtctgcaagaactttcccaaattgggataatgcgagaaatgtggggtggtgataccccaatgatcgagataagtgctcttactggggataatgttgatgaacttctggaaactgtcatgcttgttgcagagttgcaagaattaaaggcaaatccacataggaatgcgaagggcactgttattgaagcatgccttgacaaggccaaagggcctcttgctaccttagttgttcagaatggaaccctaaacaaagctgatattattgtgtgtggtgaagcttatggaaagatccgtgcattgtatgatgactgtgggaagctcgttgac

SEQ ID NO: 30229 - DNA, 261 bp, Zea mays
  unsure at all n locations
  Clone ID: LIB3180-059-P2-M1-E1
cctttctctcgctcttgttgagacggncgattggcttgtacaaggtagcagccttgagatccagccaagatccagccatgagggagattctccacatccagggtggacagagcggcaaccagatcggttccaagttctgggaggtcagctgcgacgagcatggtattgtccccaccggacgctattgttgcaccttcgaactccagattgagcgcgtcaatgtctactacaacgagtgctcatgcggccgtttcttgcctt

SEQ ID NO: 30230 - DNA, 100 bp, Zea mays
  unsure at all n locations
  Clone ID: LIB3180-059-P2-M1-E10
ttcttttctgtctgcttccattctgttcaagggagcggcgctcttccgctgccgagggagcatccaatccaatctnctccccctagtcacccatgaccac

SEQ ID NO: 30231 - DNA, 179 bp, Zea mays
  Clone ID: LIB3180-059-P2-M1-E11
tctttttccaatctagaagcgcccctctccctctgggtctctctcttagccgggcaagactcctcaccccaatctaatcgacacctcgcctagatgggccgcatgatcttcaccatcgacaactggaaacgcaatggaaccacatatcaagtcgagaagacagttcaaaaccctcaatg

SEQ ID NO: 30232 - DNA, 129 bp, Zea mays
  Clone ID: LIB3180-059-P2-M1-E12
caaattctttgagaaagaggtccctgttgatgctgtcttccagaaggatgagatgattgacatcattggtgtgaccaaggggaaaggttatgagggtgaggtcattctttgtagtttatatattttttt

SEQ ID NO: 30233 - DNA, 305 bp, Zea mays
  Clone ID: LIB3180-059-P2-M1-E2
tcggtgtttagaccattagctttatctactgcagagcgcataagaacccgggcgacaccatagggtgtgctcgttttcctcgctttcctggcttttgttgtgagcgtcatctctgcttactagcgtgttttttgcttactttcttcttcttcttttatttttctttgttttttgtttgttttttttcctttcttctgtttttcatttttcttttttttttctctggtttatatttttttttattgatctatttgttttttttctcttttttctttctttttttcgtatttacttctatttgcttt

SEQ ID NO: 30234 - DNA, 130 bp, Zea mays
  unsure at all n locations
  Clone ID: LIB3180-059-P2-M1-E3
tcttcnatacttccacacccactgacccacagcccaggccatcatacaacgagaaggaggggtttaccgtagctgctatcaaaacaatggagaaccctgctccgagcatcgtattgtccatcttctcacc

SEQ ID NO: 30235 - DNA, 260 bp, Zea mays
  unsure at all n locations
  Clone ID: LIB3180-059-P2-M1-E4
ttcccttctctcttcatgtctctcacatctccactcccgtggcctacgcgacccctttcacccaggcgtggagagcatctcactcctcctcnnccgctcgtccctcgcccgccaagcctattgcttgggcaatagccgaccccggctccaagtcaccattcgtgcacaaggatcttcactgacctgcacccttctgtgcgtcgttgcgacaaaccccttgcaacccgtcctactactaccctctcctcgtaccctttctt

SEQ ID NO: 30236 - DNA, 207 bp, Zea mays
  Clone ID: LIB3180-059-P2-M1-E9
tcttctgcacgtcgcccccgccgattcctagttacagccttcttccgacagttagacgtggtcctctaccatccttctacttatacaatacttttatctttttctatttattactttttatttgtaaattatttatcttcatctatttttattttatctttttatttatcataattctaatttatttttattaatttttatttatat

SEQ ID NO: 30237 - DNA, 364 bp, Zea mays
  Clone ID: LIB3180-059-P2-M1-F1
ggccttcccttcatcccgtggcggcggcggcggctcgcctcctcaaggcctccagtgctcggcgtcgacgtgcgaatcagcgaccttcaacacgccgccgcttcgtttctcctgtctcctaattcctgatccgctgagcgctggcctgctctgcgcgcccggtcgtccccgtccttctgcgcagagctttctctacctctgcttctcgccttccccgcaagactgccttggcgtctctgcaaaggtagttgaatggctttaagagcacgggacattatgtttcggcgttttaaaacatttactattagcccggctctggcatctggtgtgatcagacagagtttccagcttcaacattatgcac

SEQ ID NO: 30238 - DNA, 330 bp, Zea mays
  Clone ID: LIB3180-059-P2-M1-F10
tcaccgcgtgcgaaccaagcagaccacaacaagaagaagcgtagtcggggggggaaggaaaggcgcggagcaagatgtcttggcaggcgtacgtctacgagcacctgatgtgcgtgatcgaaggacagcttctcttctccgtcgtcttcgtcgttcacttatgcatcgtttgtttattttccatgtgtttcttctttttttttacttgttggattttgttgttattattaattttttttttttattctttattttcttttattatatcttttttttctatatttttgttttttgactctgttctttttttcttctttctcttttttcttt

SEQ ID NO: 30239 - DNA, 253 bp, Zea mays
  Clone ID: LIB3180-059-P2-M1-F11
tctattgagaccaactagcaacatagaaaggacaatagtgtaccaacagtgggggccaaaatattttgcttccttatgctccttggtctttctgcaagtgttgctaccgcaaccattttcccacaatgctcacaagctcctatagcttcccttctttccccatacctttcaccagcggtgtcttcaatgtgtgaaaacccaattgttcaaccctacaggatccaactggcaatttcatcaggtattttaccat

SEQ ID NO: 30240 - DNA, 143 bp, Zea mays
  Clone ID: LIB3180-059-P2-M1-F12
tcgctccctccagttccgatctaaacccggcgaaaccctaatccccatggctggcgccatggtcaaccccatcctgaccctccccgcaccggagggcaacggcaccgggggcgagttctctctttcagcatttttctttcatt

SEQ ID NO: 30241 - DNA, 96 bp, Zea mays
  Clone ID: LIB3180-059-P2-M1-F2
tgtatcttttatgcactccaccttgccaagggtaatggctccaaaggagacggcggggacgcttcctcatacacacattaagccactccctacact

SEQ ID NO: 30242 - DNA, 434 bp, Zea mays
  Clone ID: LIB3180-059-P2-M1-F8
tctctttctttgcacaccaacacggtctgcgacaatgtgtggaccttcattgtgacagaggcatccttcaatagcgcttatattcaagaaacacttagcttgatgggtttcaatgtcttgtttgcctttttgcttactttttccattacttgtattcattctcactattcgtttattatacattctgtggctcatatgccaaccatttgtaatgtttgttctcttactaatttgcgtattttaattgtctcttcgttctttttcgatattatttttatttattgtttcatttatatcattcatatcttttttttattttattatttactttattcattacttttatatttttatattatttaaattatatatttttctcatttttttccttttattcttttctttattttcatttactgctttatattcacttt

SEQ ID NO: 30243 - DNA, 430 bp, Zea mays
  Clone ID: LIB3180-059-P2-M1-G10
tctcttttctcagcagttaccattcatgttcaacccaatgtccttttctataggggtggggctttctcttcctccctttactcatttctttatttcatttattccttattgccttttttccgtttattttattacttcttctatttctctttctttctttacttttttttattttctttatattttttctttctttctttttctctttatttgtttcttcttattttttcttttttctattttctttctttttctttcatttttttatttattctcctttactcttctattcattttcattttaccttactttctcttttcttataccattctttttcttttttttttcttatttaatccaattctcctttttcatctatttcttctttcttttttatttcttctattctattttctttaattctccttt

SEQ ID NO: 30244 - DNA, 381 bp, Zea mays
  Clone ID: LIB3180-059-P2-M1-G11
tctgagagcgaggtggagagagagagagagaggaaaaccctgccccgtccaggcagccgtcgtcgacgcaaacggcggaggccacagagacgccacgcgagggagccccgccgcagcagcacccgcgccgtcccaattcggcgccccgatcgccggatctcctcgccggcgccggggccctcgatcgccctctccccatgcccgtgcccctccgggggtttcattgtgcgggcgccggtcatgtcggacctcgcttccagctgcatggataaacttgcgtattttaaaataaaggagctcatagatatcttaaattagctggggtttccgaagcatggatagatgtattaccttgttacagggtattggctttttttttta

SEQ ID NO: 30245 - DNA, 299 bp, Zea mays
  Clone ID: LIB3180-059-P2-M1-G12
gatcgccacgagacgccgcgcgatccgacccaggccgacgccgacgacccctctcgccgccggcggccatggcgtacggcgaccgcgtcaccaccttcgaggactccgagaaggagagcgagtacggctatgtccgcaaggtctctggacctgtggttgtggctgatggaatgggtggtgctgccatgtatgaacttgttcgtgtcggacatgataacctcattggggaaattatccgtcttgagggcgattcagttacaatccaagtttatgaggaaaccgctggactggtggttaat

SEQ ID NO: 30246 - DNA, 127 bp, Zea mays
  Clone ID: LIB3180-059-P2-M1-G2
tctcattacttgtttcaaatctatcgcaatggtgtaacgttcttgggatgggcccaagtggagatggccccactgatggcagttgtgtttctctctcgcgtggctgttgtcttgacagtttatcttt

SEQ ID NO: 30247 - DNA, 106 bp, Zea mays
  Clone ID: LIB3180-059-P2-M1-G3
ctcatctgcgtacacggtctccctcttcctgtcagtagtagagagagagggagggagcgagtgggagacaaggggaaatggggaagggagcgcaagggagcgatgc

SEQ ID NO: 30248 - DNA, 99 bp, Zea mays
  Clone ID: LIB3180-059-P2-M1-G4
ggtaaagctctacacctgcaagtaccgatcccccatttccactccacaccctctcttttcttcaccactaccattcatacttcaacaccaattgtcctt

SEQ ID NO: 30249 - DNA, 118 bp, Zea mays
  unsure at all n locations
  Clone ID: LIB3180-059-P2-M1-G9
ttttctctttttctaccccttcctcctctacaccctgggccaccttatcttcggaggcaggcgcnctcttgccctttccccaccccttcataagtacatcttcttcgtcaatgccaac

SEQ ID NO: 30250 - DNA, 307 bp, Zea mays
  Clone ID: LIB3180-059-P2-M1-H1
tcggaacatcccaacccaagtcccgaaccctgcctcaccactcccccgatctccggcactccaaaatgtggcgccgccaccacctcctccggctacttccgcctccggccaccgccgctaccgccgcggccccttcccacttcctgcgctacctctctacctcaagcaccccgaccccggccgcctccctggcctagtccctcgcgtcggcgctcactgcgctctccacgaccccgtcccccggcaccaaccccggacggttaccttctccttcactttttcgacgtgcgggctaccaacgcgcttc

SEQ ID NO: 30251 - DNA, 313 bp, Zea mays
  Clone ID: LIB3180-059-P2-M1-H12
ggcccagacccattcgttctttagcctccaaagccactcccgaaccccaggttccagaaccttgtggaagctccccgccgcctcctccactcgcaccgatggcgaaagaaccaatgcgcgtgctcgtcactggcgccgcaagacaaattggatatgccctggttcccatgattgctaggggtagtatgcttggtgcagaccagtctggtattctgcacatgcttgacattccgccagcagctgaagcccttaatggtgttaagaaggagttggttgatgctgcgtttcctcttctgaagggagtagttgctac

SEQ ID NO: 30252 - DNA, 396 bp, Zea mays
  Clone ID: LIB3180-059-P2-M1-H2
tctttttgcaagcctgcatctacctcattggaagctcacgtggtgttcgatgaaaaggagcaaagctggaacttcattttcgcggagtacgctgcagcagctggacatcatcatctctcaattgtatggcaaatagcggaggattactcccattgcgaatttctgctccaactccccatatactgccccatgcctgctttccgtgctgtcacacaagttcagcaggatgctgttggacaaggacagtcggtgcctggggacaaagttctcaacaccctgtccatcaggtgtttgacgaattgctttagcatcatacattgtcgttttttgcactcgtgcaattgcagaacggttgcagtgcagcataagctatcatggcctccgcctgtacagtat

SEQ ID NO: 30253 - DNA, 181 bp, Zea mays
  Clone ID: LIB3180-059-P2-M1-H8
tcttcttttccattccggttccggctttcgcggccagcggctgtaatcccgtaatcgctgctccctgttcctggacgccttttccttcgccgtttccttattgttcttgtttgattgattgggtgttcactttatatgtctgtcattttactaatttatatttcgatcttttcatcaattt

SEQ ID NO: 30254 - DNA, 197 bp, Zea mays
  unsure at all n locations
  Clone ID: LIB3180-059-P2-M1-H9
tttccgcccccccattcccctaccctcttgggcgccgtcccccctgccatcggctcctttctcaagcacttgcaaccacacatcaaaccctagccgnccccccccccatctccacctcccatggtgccattcgttgccgctcggatctccgtcgcgtggtgcaaatcttcaacggttttcggtggagggaggtaggg

SEQ ID NO: 30255 - DNA, 313 bp, Zea mays
  Clone ID: LIB3180-060-P2-M1-A1
tcggagcaagcaggaacacctcaatggcgcggtgggcacccccacggttgggcaggaggaagagataatcgggccgggcccagcgccggcgaagcagcggcagaagcgccctctccagttcgagcaggcgttcctcgacgccctaccctccgccgccatgtacgagaagagctatatgcatcgggatgtcgtcacgcacgtcgccgtatctcctgctgaacttttcatcactgggagcgcagatgggcatctgaagttttggaagaagaaacctgttgggggtggaattgctaaacatttacggtcttatctt

SEQ ID NO: 30256 - DNA, 342 bp, Zea mays
  Clone ID: LIB3180-060-P2-M1-A10
tcttatcaaggaggtttctcatgagtggcaattggtaaacaagcagaagccaatctggatgaggaagcctgaggagattaccaaagaagagtatgctgctttctacaagagcttgaccaacgactgggaggagcatcttgccgtgaagcacttctctgttgagggccagcttgagttcaaggctgtactctttgtgccaaagcgggcccccttcgacctctttgacaccaggaagaagcagaacaacatcaagctctatgtgcgacgtggtttcatcatggacaactgttaggagttgatcctatagtggctgagcttttacaagggtattgttagactttt

SEQ ID NO: 30257 - DNA, 256 bp, Zea mays
  Clone ID: LIB3180-060-P2-M1-A11
ttgaggagtactggtggtgcaccgagcgctgcctcgactggggcgaggcgggcggccccgacctcatcgtcgacgacggcggcgacgccacgctgctcatccacgagggtgtcaaggccgaggaggactacgagaagaccggcaagatccccgatccggagtccaccgacaacgctgagttcaagatcgtgctcaccatcattcgtgacgggctcaaggctgacctcaagaagtaccgtaagatgaatgagaggct

SEQ ID NO: 30258 - DNA, 126 bp, Zea mays
  Clone ID: LIB3180-060-P2-M1-A12
tgtaccgggcggcctcctccccgaaccctaggccccctacaaccaccgcgtgcggcctcctctgggcggctccgccccagatccagcacagcaggttaaaaagggggcgggcaggcgttggatgga

SEQ ID NO: 30259 - DNA, 412 bp, Zea mays
  unsure at all n locations
  Clone ID: LIB3180-060-P2-M1-A2
tgagccctgcanngggatgcggacgcanncagcgcgaaggggcattaaccgcacnntctgcccggttacccccgaaaaactggtggtgactcactncggcganttccggcgcgtgagggtcaactcatgattcaaagtcagcacgcgcgtgatgnctgcnntggctgnnaccctgatgacgtnntcgtgtccccgtaccaactgnnngcgtaatcaatggccnnncttcggggcccaattggtttcttcttgtggagnnggagtccatngnnacgaaagggatgaaccttgattggcccgccttccgcttcgcnttgggtgaacccaactgannaccgtgatgnntcagcctgaccggggacccgaaaggaaagaactggccgctcctgtgtggcagaagcttgaaagagga

SEQ ID NO: 30260 - DNA, 106 bp, Zea mays
  Clone ID: LIB3180-060-P2-M1-A3
tttggttgaggacaagggcacgggcaagtcggagaagatcacgatcacgaacgagaaggggcggctgagccaggaggagatcgaccgcatggtgcgggaggcggag

SEQ ID NO: 30261 - DNA, 103 bp, Zea mays
  Clone ID: LIB3180-060-P2-M1-A4
tctatttgtcactgatcgttgatcagcctagctagctagcgctgttttcctgggggctaatgacacccgttcaatgtgcgcgttcgcagagggtgtttcaatt

SEQ ID NO: 30262 - DNA, 114 bp, Zea mays
  unsure at all n locations
  Clone ID: LIB3180-060-P2-M1-A6
aaaacaaaaaaanaaaaaaaaanaagggggaaaaaaaaaaaagaaaaagagaaaaaaaaaaaattttgaacaaagaagaaaaaaaaaaaggggggaaaaaaaggaggggggggg

SEQ ID NO: 30263 - DNA, 225 bp, Zea mays
  Clone ID: LIB3180-060-P2-M1-A9
tcggtcccgccttctccgacctcgcctttctccatctagggtttctctctccggttccaccccatcggaccggagcttcgcatggagtcatcgcagtctcggaagcggacgcgccaagcgtatgactgcgccgccgcgctgccaccagagcgagaagtggtagcgaggggtggcgcgtcgcctccatggagggaggatgacccgctacgacacttcttctctgat

SEQ ID NO: 30264 - DNA, 214 bp, Zea mays
  unsure at all n locations
  Clone ID: LIB3180-060-P2-M1-B1
gacccgggccacactccgctgctccgccatggcgatccgctccaaggcctggatctcgctgctgctcgcgctgaccgtcgctctctccgcccgggcggaggaggagcccgccgccgcggcggagggcgaggccgngctcaccctcgacgacgacagcttcgacgaggccgacgccaagcacccctgcatgggcgaagagcnctacgccccctgg

SEQ ID NO: 30265 - DNA, 170 bp, Zea mays
  Clone ID: LIB3180-060-P2-M1-B10
ttttacttcagctgcgcctcgactcgtagcccgaaccctagccaccaagccgggggcgagagagcagccatggcgcggtgcctcgcgctcgtcgccctcctcgtactcggcctcgccgccgtcgcctccgttgccgacgcgcccttcgttgtcgtgcacattaatgattt

SEQ ID NO: 30266 - DNA, 391 bp, Zea mays
  Clone ID: LIB3180-060-P2-M1-B11
ttttcaactagcaacatagaaagcacaatagtgtaccaacaatggcagccaaaatattttgcttccttatgctccttggtctttctgcaagtgttgctaccgcaaccattttcccacaatgctcacaagctcctatagcttcccttcttcccccatacctctcaccagcggtgtcttcaatgtgtgaaaacccaattgttcaaccctacaggatccaacaggcaatcgcaacaggcatcttaccattatcacccttgttcctccaacaaccgtcagccctattacagcagttacctttggtccatttggtggcacaaaacatcagggcacaacaactacaacaacttgtgctagcaaaccttgctgcatactctaagcaacatcaattttt

SEQ ID NO: 30267 - DNA, 301 bp, Zea mays
  Clone ID: LIB3180-060-P2-M1-B2
tcgattcctcccaacaccacctcgcctgcgatctccgtagcctccgtcgcgtggagcatcgatcatgtcggcctactgcggaaagtacaaggatgagctcatcaagaatgctgcctacattggcacccctggcaagggtatccttgctgctgatgagtccactggcaccattggcaagcgcctttccagcatcaatgtcgagaacgttgaggagaaccgccgtgccctccgggagctcctattctgctgccctggtgctctccagtacatcagcggtgtgatcctctttgaggagaccctg

SEQ ID NO: 30268 - DNA, 160 bp, Zea mays
  Clone ID: LIB3180-060-P2-M1-B3
tctggtcatctgctaggagctgctggtggaatagaggctgttgctgctatacaggctgtaaggacaggttgggtgcatccaaatctcaatttggacaatccagagaaaaccgtggatgtcaggatgctggtgggcccgtagaatgagagatgttatttga

SEQ ID NO: 30269 - DNA, 149 bp, Zea mays
  Clone ID: LIB3180-060-P2-M1-B5
tcttaatatctcttatgcattaacatttgcagagatgaacatataatgttcacgggcgtttgaagaagatctgaaagattttcctatagatctacagaacgggtcatttgtcatgttacaaactggaatcatgtcttttattaacttta

SEQ ID NO: 30270 - DNA, 308 bp, Zea mays
  Clone ID: LIB3180-060-P2-M1-B8
tcggccacagcagcctccttcctcctctcactctcgctcgcgctgcgctcgctacctcgcttcgcattccattcgaaaagaggggaggaaaggcaagatgttcatcgagagcttccgcgtcgagagcccccacgtgcggtacggcccgatggagatcgagtcggagtaccggtacgacacgacggagctggtacacgagggcaaggacggcgcctcacgctgggtcgtccgccccaagtccgtcaagtacaacttccggaccagaaccggcgtccccaagctcggggtgatgcttggggggtggggag

SEQ ID NO: 30271 - DNA, 154 bp, Zea mays
  unsure at all n locations
  Clone ID: LIB3180-060-P2-M1-B9
tggcgccgcctccgagacagccgncggagcgcatggacaccaccgacggggcgggtaccgcactcactggcaccactaccgctgcgcccaaggcgaggcgccgggcgcacctcatgggcacccgacgagcccttgtctttcccataaggagctt

SEQ ID NO: 30272 - DNA, 232 bp, Zea mays
  Clone ID: LIB3180-060-P2-M1-C1
cacaactattgtaggatggtcacataccatgtgaggaaattgtttaagacggtagattagtatttattacaactgaataatacatatgcatgacacgtgaattttggttccgattttaatggccttattacctctgcgtgcacatgaaggcagcggggatatgtggtggccatgcgcactacctaagggtgcgcattacgatctgatgtgtgtgacactctatgccgatgga

SEQ ID NO: 30273 - DNA, 165 bp, Zea mays
  Clone ID: LIB3180-060-P2-M1-C10
tttctgctcgtgctgtgtctctgtctgtcggtctcgctctcagacgactggggcggcgccgcttggtgctgaggctttcgttggtctcttcggcggcgacgagcacccaccagttctgtagaaatggctgatggtgaggacatccagcctcttgtctgcgacaat

SEQ ID NO: 30274 - DNA, 338 bp, Zea mays
  Clone ID: LIB3180-060-P2-M1-C11
ttgctcgctagctctgcatcatccgtcgttctggtgagcgagcgagcgagtgagagacctagctagactgaccggccgccggcaggccgagaacgaagcgcgtgtttgtgcatgagccatggcggaccagcagcagccacagcagcagccgcaggagatggacgttgatcgtaccggtggcctcgaactgcctccagggttccgcttccacccgagcgactttgagattgtcaacgactacctcacgaagaaggtgcacgacagggactacagctgcatcgtcattgtggactccgacctaaacaagaccgagccatgggacctccctaaagttgtaa

SEQ ID NO: 30275 - DNA, 235 bp, Zea mays
  Clone ID: LIB3180-060-P2-M1-C12
tcgcagatcagcaaagcggcagtgcgtagagaggatcgtcgaacagaacagcatgaagatggtcatcgttctcgtcgtgtgcctggctctgtcagctgccagcgcctctgcaatgcagatgccctgcccctgcgcggggctgcagggcttgtacggcgctggcgccggcctgacgacgatgatgggcgccggcgggctgtacccctacgcggagtacctgaggcagccgcagtgc

SEQ ID NO: 30276 - DNA, 272 bp, Zea mays
  Clone ID: LIB3180-060-P2-M1-C2
tctctcctctttggccttcctttccttgcgacgacgactgggacgagcgccccccgcgcttctgcaggcgagcaccccgccaccagtcggagatgaacgcgtccaggaaatccagccatctctccagcaaggacagtgcagagaccgcgagggatatcatcaccacgtccggccaaatccaacccctcaaaatcccggacgctgttgctgtgctcgcacaggctgctgtaaaggcaaatgatcttccagggtggcccgttttcttaactcct

SEQ ID NO: 30277 - DNA, 56 bp, Zea mays
  unsure at all n locations
  Clone ID: LIB3180-060-P2-M1-C4
acatncgtggctaccatctcaaatatgactacacaatatggcgcaactataaaatt

SEQ ID NO: 30278 - DNA, 142 bp, Zea mays
  unsure at all n locations
  Clone ID: LIB3180-060-P2-M1-C8
ngtcggtcggctgccgcaaactgatataagccggcactccttaaccgtatgcgcgggtcatactaaatcaaataccacaccactctactgacgccctacgagattaatatttttctttaaccatttgtaacgtttatattat

SEQ ID NO: 30279 - DNA, 247 bp, Zea mays
  Clone ID: LIB3180-060-P2-M1-C9
ttgtaactagcaacatagaaagcacaatagtgtaccaacaatggcagccgaggggttttgcctccttatgctccttggtctttctgcaagtgctgctacggcgaccattttcccgaaatgctcgcaagctcctatagcttcccttcttcccccgtacctttcaccagcggtgtcttcggtatgtgaaaacccaattcttcaaccctacaggatccaacaggtaatcacagctggcattttaccttta

SEQ ID NO: 30280 - DNA, 319 bp, Zea mays
  Clone ID: LIB3180-060-P2-M1-D1
caccaacctttagcaccaggcaaaccaaacactaggccaacgcaattctctagagcactgtaggctctagttctccagaggcccgccacaaccacaagccaaggccacagccagtgccctcgccatggctcccaacctcagcaagaagacgcctgctggcctcctcggcgacgaggtggccccggtggagggactcaagccgtcgcggttcacccttaagggcaaggacctggccgtggacgggcacccggtcctgctggacgtgccggccaacatccgtctcaccccggcgtcgacgctcgtgcccgccgtggactgt

SEQ ID NO: 30281 - DNA, 394 bp, Zea mays
  Clone ID: LIB3180-060-P2-M1-D12
gcttgatgagtaccttctcactcgcagctacatcactggctaccaagcttccaaggatgacttggctgtctacacttcgttttcgtctgctccctcgtccaagtatatcaacgtagcaaggtggtttaatcacattgatgcgctcgtgaggctgagcggaattactgcagagggccaaggtgtgaaggttgaatcctcagcagttccttcagccccaactccagatgttgctgaagcacaggccccagctgctgaggaggaggacgatgatgatgttgacctttttggtgaggagaccgaagatgagaagaaggctgctgaagagcgtgctgcagctgccaaggcttctggcaagaagaaagaatctggtgagtcatcagatttacttgatgtg

SEQ ID NO: 30282 - DNA, 90 bp, Zea mays
  unsure at all n locations
  Clone ID: LIB3180-060-P2-M1-D3
tctgtttacaagccaccatgccaactctactagcgtgtctcactgcgtagtctggtgtgggggtncccgcaacaaattactagagacgaa

SEQ ID NO: 30283 - DNA, 134 bp, Zea mays
  Clone ID: LIB3180-060-P2-M1-D5
tcttttttattgatatccctatgagtaactggtgtcaacagtggtataaatagtgtatttgtcataaatcagttcaattctacttcgcttaaccgtcatattcatcgtacataccttgaaggcggaatcaactt

SEQ ID NO: 30284 - DNA, 289 bp, Zea mays
  Clone ID: LIB3180-060-P2-M1-D6
tcttttcggcacagcgcacccactccgctcaggcccttcgttcacccccatgggtgcagccagccagccagccatgggcggcaaggactgcggcaaccacggcgaggacgacctgcggcggtcgtgccggcgcctgctagcgatcctcctagtcctggccctgatcgtgggcgtgatcgcgctgatcatctacctggtggtccgacccacgcacccgcgcttctacctgcaggacgcgttgttgtatcaactagacctcttcaacgccaccaccaccatcaccaccttc

SEQ ID NO: 30285 - DNA, 63 bp, Zea mays
  Clone ID: LIB3180-060-P2-M1-D8
ttttgccgccgccgctgcagtgtccataggcggcgaattaaactgagatgggggggctaataa

SEQ ID NO: 30286 - DNA, 113 bp, Zea mays
  Clone ID: LIB3180-060-P2-M1-D9
tttctgctatctcgattcaaatacatacatgctcggttactacgtcccgcagcgtcgtgaccccataaccaagatcaagatcgggatcaatgggttcggcaggatcatcaagg

SEQ ID NO: 30287 - DNA, 356 bp, Zea mays
  Clone ID: LIB3180-060-P2-M1-E1
ccgtcatcgatctcgtttcaaatccatccatcctcgtttcctccgtcccgcagcatctcaaccccatggccaagatcaagatcgggatcaatgggttcggcaggatcggaaggctggtggccagggtggccctgcagagtgacgatgtcgagctcgtcgccgtgaacgaccccttcatcagcaccgactacatgacctacatgttcaagtacgacactgtgcacggacagtggaagcaccatgaagtcaaggtgaaggactccaaaacccttctctttggtgagaaggaggttgctgtgtttggctgcaggaaccctgaggagatcccggggggttcgggtggtgctgaatatgtt

SEQ ID NO: 30288 - DNA, 278 bp, Zea mays
  Clone ID: LIB3180-060-P2-M1-E11
ttctgaagcaatcggaattctctgcgatttctctagatctcgactaccccccactagttttggttcctcctttcgttcgagagagcgattctggtggcaatggcgaagagcgagggtccggcgatcgggatcgacctcggcaccacctactcgtgcgtcggcgtgtggcagcacgaccgggtggagattatcgccaacgaccaggggaaccgtaccacgcctgcctatgttggtttcacctacatcgagctggctcatttcgaattattgctctataa

SEQ ID NO: 30289 - DNA, 410 bp, Zea mays
  Clone ID: LIB3180-060-P2-M1-E12
tcgtagcaacatagaaagcacaatagtgtaccaacaatggcagctaaaatattttgcctccttatgctccttggtctttctgcaagtgctgctacggcgaccattttcccacaatgctcacaagctcctatagcttcccttcttcccccgtacctctcaccaacggtgtcttcggtatgtgaaaacccaattcttcaaccctacaggatccaacaggcaatcgcagctggcatcttacctttatcacccttgttcctccaacaatcatcagccctattacagcagttacctttggtgcatttattggcacaaaacatcagggcacaacaactacaacaacttgtgctagcaaaccttgctgcctactctcagcaacagcagtttcttccattcaaccaactagcttgatt

SEQ ID NO: 30290 - DNA, 365 bp, Zea mays
  unsure at all n locations
  Clone ID: LIB3180-060-P2-M1-E2
tcggaccagaccggcaggcaccttcgactcgagcggagcaggcgaggcagagatggcgctgcgacgggcgctcctcagatcggtcaacttctcccccgacagcaaggctgcaattgagtacttttattctttctcaagggcacagtctgcttgttctctcaatggtgctggtctttgtcctgctagtagatcatttagcacccaggctgccactacgtcaagcacaccacagcctgcacctccaccaccccctccagagaagactcactntggtggtctcaaagatgaggatcgcattttcaccaacctctatggtctgcatgacccttttctgaaaggcgcggtgaagagaggtgactggtata

SEQ ID NO: 30291 - DNA, 325 bp, Zea mays
  Clone ID: LIB3180-060-P2-M1-E3
gtctaagccctggcctttgcaacacttatagtggaaggcaatcatgttaggctaagtggacaggatgtggaaagaggaactttcagccatcggcatgcagttctgcatgatcaggaaactggagcaaagtactgcccacttgaccatgttgcaatgaatcaaaatgaggagctatttactgttagcaacagttcactttcagagtttgctgttcttgggtttgaattgggttactccatggagaaccctaattcattggtactttgggaagcacaatttggcgaatttgccaatggtgcccaagtgatgttcgaccaatttttga

SEQ ID NO: 30292 - DNA, 136 bp, Zea mays
  Clone ID: LIB3180-060-P2-M1-E4
tcttttctctcactctcgttccatttccccatgtgccagatccaattcgcgagtgctggctcctctgccgccatggcgctctctgtggagaagacctcgtctggacgggagtacaaggtcaaggatctctcgcagg

SEQ ID NO: 30293 - DNA, 150 bp, Zea mays
  Clone ID: LIB3180-060-P2-M1-E5
ttgattgctaagatggacgcgactgccaatgacgttcccagtgagtttggcgtgcgaggctacccgaccttgtacttcgtgaccccgagcgggaaggtgacatcctacgacagtggcaggactgcggacgacatctttgatttcattaat

SEQ ID NO: 30294 - DNA, 134 bp, Zea mays
  Clone ID: LIB3180-060-P2-M1-E9
tgctaaaacccgcatctcctccatcccaccccgcgccgtcaccgccggcgcggcccctcccgtcccgaaccctaaccccactccatcatggcggccggccactacgatcgcgaggacggcctgcctccatcggc

SEQ ID NO: 30295 - DNA, 388 bp, Zea mays
  Clone ID: LIB3180-060-P2-M1-F1
cttttcttcccgagcaggaggcggacaaggtaagcagcaatcgcaggaaccctagcgccgccgcacccgcaggaatgggtatcgacctcgtcgccggtgggaggaataagaagaccaagcgcactgcgcccaagtctgacgatgtctacctcaagctcctcgtcaagctctaccgtttcttggtcaggaggaccaagagcaatttcaacgctgtcattctcaagaggcttttcatgagtaaaaccaaccgaccaccaatctccatgcgccgccttgtcaagtttatggaaggaaaggagaagaacattgctgtcattgttggcacagtcacagatgacaaaaggatccaggaggttccagcaatgaaggttacttgcctgagggtcac

SEQ ID NO: 30296 - DNA, 275 bp, Zea mays
  Clone ID: LIB3180-060-P2-M1-F11
ttctgtaccaactagcaacatagaaagcacagtagtgtaccaacaatggcaggcagaatattttgcctccttatgctccttggtctttctgcaagtgctgctacggcgaccattttcccacaatgctcacaagctcctatagcttcccttcttcccccgtacctctcaccagcggtgtcttcggtatgtgaaatcccaattcttcatccctataggatccaacaggtaacttgtagctggcatcttacctttatcacccttgtttctccaacatt

SEQ ID NO: 30297 - DNA, 210 bp, Zea mays
  Clone ID: LIB3180-060-P2-M1-F12
tctaacaaagagaaagaaagaaaactagaggcgcccgcacgcaaaatccaaacccaaaccctcggcgaggacgccaccgtggcgaccgcggtggatgcagcgggtctggtgcccgccgacctggagcggcgggtgatggcggcggtgaaggcgtcggaggcgcgcggggacccgtcgcttctgtaggtggtggagctattctctatcgtt

SEQ ID NO: 30298 - DNA, 266 bp, Zea mays
  Clone ID: LIB3180-060-P2-M1-F2
tcgaagccagagccagcggaaccgaacggaagcgagacccccggcggctagcgagatggacggcggcgccggcgaggaggggaagcaggagcggcacctggtgctggcccacaagctcttccttctatcccacccctccgttgatgacctctccaaggtcgccctccgcgccgaagtcctcgacaccgtgaaatccgatgatatggcgacgctgtttgagtcgttggtctgccgcgggtgagctgtacgtggactccttgctttct

SEQ ID NO: 30299 - DNA, 157 bp, Zea mays
  Clone ID: LIB3180-060-P2-M1-F3
tcttttgtaaaagctgagattgatggggcatcaaagaaaaataaaaagggcacgggcggaatcactgatattgacacaataaaagtaaacaactattaaactttcgttttgctacacttcttctccccttatcccttcctctctcatatttattcat

SEQ ID NO: 30300 - DNA, 74 bp, Zea mays
  unsure at all n locations
  Clone ID: LIB3180-060-P2-M1-F4
aaggagtaaagacggagggagggggtgggaaancaagagcaaagggggggcgttaacaaaggcaagccagtgga

SEQ ID NO: 30301 - DNA, 54 bp, Zea mays
  unsure at all n locations
  Clone ID: LIB3180-060-P2-M1-F8
tcttgcagcggncgcccaatcgccgtcggcggctcgcccgtggcccgcgggggg

SEQ ID NO: 30302 - DNA, 282 bp, Zea mays
  Clone ID: LIB3180-060-P2-M1-F9
tctaccgaaaccgagagctagtgcttgattcggtcggatatgggcaccgggcgcgttattgggaccgccgtcgtctacctacttccagtcccagctgctcatgtctgcatcggtctaaagccctttgccggcgacgagcactcacaacaccagggtgttacaatgtcttcttcaatggaatctgtataccttactgatacaactgagtcatttacccaagctcaagaggctaaggatgcttcaaagttcattttaatcctttaccgagtaattcaggaccca

SEQ ID NO: 30303 - DNA, 334 bp, Zea mays
  Clone ID: LIB3180-060-P2-M1-G1
agcagctcatgctgaggtacggtagccccggcctggaccgcttcgaccctgccctcttctccccgctgcacgagtcagtcgacggcgacggctacggctacgagcagtcgccggcgcacagctacgagcccgagcgaagcccttgcgctaggcccggcgggacggcgacggcctcgtcctcccccgccgcagcaccggggaagaaagcggggccgcgcaggctcaagcttctcggtaacatcaagaagctgctgccggcggtcggcaagagaagccactcaaaccacgggcacgggcacgccggccacgatggcaggaaggcgccggcgcccgc

SEQ ID NO: 30304 - DNA, 314 bp, Zea mays
  Clone ID: LIB3180-060-P2-M1-G10
tgatgaacaggaccacgagagcccagtaaaagcaaaattaaccagcattgcggctccataccagaagccactgaagccttatgttcaccccctgctaattccaaatgacgacgaacctgtgaaacaagaggaggaagaagggctcttcacgtcaattggcaagcttgtgggtggagcaaaatcatcaattgcagagatcattggcgccgcattctccagaaagaagcgagtgaacgttcattattattagctgggtaggccaacttcctggccagtacatgaaagctatgccattctgctggacttgacctcat

SEQ ID NO: 30305 - DNA, 163 bp, Zea mays
  Clone ID: LIB3180-060-P2-M1-G11
tcttcgcgacgtacgtccgcgccacggcctccgccggcgagccggacctgtgggggcgcgtgaacgggctgcagatgcccaacccgttcgtgatcgggtcggggccaccgggcaccaactacaccgtaatgtagcgcgccttctactagggctggagcgctca

SEQ ID NO: 30306 - DNA, 396 bp, Zea mays
  Clone ID: LIB3180-060-P2-M1-G12
gcgaagtcttcctcaaccagagcttagattgctatgttcattgcttgcgcatgatggattgtcggacagcgcttatctccttgtaggtgaagtgttgaaaaagattgtggctcttgcccctttcttctgttgccatttcataaatgagcttgcacgttcaatgcaaaacttgacacttcgtgcaatgaaggagcttcatttgtacgagaattctgaaaaggctcttcttagctcttcatcagccaatggtactgcagttcttagagtagtgcaggctttgagctctcttgtcaatactcttcaagagagaaaggatccagaacagcctgctgaaaaggaccattcggacgcagtttcccagatttctgaaattaacacagcattggattctctgtg

SEQ ID NO: 30307 - DNA, 93 bp, Zea mays
  Clone ID: LIB3180-060-P2-M1-G2
tgggtaattcagctcgtgcttcgacaggccttagccctagcgcagctttcgggcggcggcaaacagcctgggagcctaggtgatctatctctt

SEQ ID NO: 30308 - DNA, 262 bp, Zea mays
  Clone ID: LIB3180-060-P2-M1-G3
ttcttttccaaactcactgatgagattggacagaaagtgcagattgtaggagatgatcttctcgttaccaaccccaccagggtcgccaaggccatcaatgagaagacctgcaatgctctcctcttgaaggtgaaccaaatcgggtctgtgaccgagagtatcgaagctgtcatgatgtccaagcgcgccggatggggagtgatggcaagccacatgattggcgatacatatgacaccttcatttttgactcctcattttttc

SEQ ID NO: 30309 - DNA, 56 bp, Zea mays
  Clone ID: LIB3180-060-P2-M1-G4
tcggggtgaagtagatctgcatctgcgagagggggcagcttttttgaagatggggg

SEQ ID NO: 30310 - DNA, 101 bp, Zea mays
  unsure at all n locations
  Clone ID: LIB3180-060-P2-M1-G5
ttttngtgncttcagaccattagctttatctactccagagcgcataagaaccgggtcgacaccatgagggtgttgntatatacctcttactttctcttctt

SEQ ID NO: 30311 - DNA, 103 bp, Zea mays
  unsure at all n locations
  Clone ID: LIB3180-060-P2-M1-G8
tgntctcaggagcgnggcctcactctcctcggcgcatcccccctcctcatgggcgcagcgcggacggcggcaatggcgatggcctccacctacgcgccgggcg

SEQ ID NO: 30312 - DNA, 231 bp, Zea mays
  Clone ID: LIB3180-060-P2-M1-G9
tcttaggcgtagaggcccagatcgtgtcccagtgcaacatctacgaggcaggtggagggcccccaaagaagacaactgtattcaagtacatgccggagaaggccggcgaccgagaggacgtggtggcagggtcgatcagctcggaaggggacgccttcctcaatggcgcgctgccctgcctgatcgataaccctgggtctgtctttcacgccagaggagtactactagcat

SEQ ID NO: 30313 - DNA, 394 bp, Zea mays
  Clone ID: LIB3180-060-P2-M1-H1
tcgtcatcaccaacaatcgcaagactccttcgagtcggaggcatatcgagtgaaatggaacaaatcaccaccaccacaccagcaatcgcaagactcctttgagccggaggcatatcgggtgaaatggaacaaatcaccaccaccacaccaacaatcgcaagactcctttgagcaggaggcatatcgggtgaaatgggaccaaatcaccaccaccacaacaacaaacgcaagacttcttcgagcaggaggcatatcgggtgaaatggaacaaatcaccaccaccacaccagcaatcgcaagactccttcgagccggaggcatatcgggtgaaatggaacaaatcaccaccaccacaccagcaatttgtatgactcctttgagccggaggcatatt

SEQ ID NO: 30314 - DNA, 378 bp, Zea mays
  Clone ID: LIB3180-060-P2-M1-H10
ttttcttttccgcacccacttcggaggagcgcgggccactgaatacggcctcgtctacgacaacctcgaggctgccaagaagttcgagccgaaataccgcctcatcaggaatggtcttgctactaaggttgagaagtcccgcaagcaaatgaaggagcggaagaacagggccaagaagatccgtggtgtcaagaagaccaaagctggtgacgccaagaagaagtaaacgttcgtttacatttgtattactgttctgggctctgggtggtctagctgcaatgtcataattatggacgagttaggttttgttccacctttggcacttaagtgaattttttttaaatttctccccacttaactgatattttgttataatat

SEQ ID NO: 30315 - DNA, 362 bp, Zea mays
  Clone ID: LIB3180-060-P2-M1-H12
tatccgtacccgagcactgcacagcacagcacagcacaccacctttaggatatagcaatagcacactcggcccccctcctcttcaactcccccggccgtcctgctcgccggcttctggctggcccctgcatccgcccagtgtgtgtgacctcagggaatcgattcgttcatccaagtgaaggcaaccagactccaggatggagttcaaagccggcgttttcaccgtggcaatgctagccatcgtcgtgctctccacaccagcagccccgcagaagcccaagagccctcccgctccgcgatccccagtcgtcctggcgccggcgccagcgcccgcaccggcggcgccgcaccacgtggacctt

SEQ ID NO: 30316 - DNA, 181 bp, Zea mays
  unsure at all n locations
  Clone ID: LIB3180-060-P2-M1-H2
aaaaaagggaaaaaaggcgcccacgancgagggaaaagggaaccacgggcgggcgacaaaaaaccccccacggacaaaacccgaggccagccaagcggcggagcccgcgcgcccgccnccaggaccaaggccgaagaccacaacaccaccgcgccgaccgacccgacggcagcggagacag

SEQ ID NO: 30317 - DNA, 266 bp, Zea mays
  Clone ID: LIB3180-060-P2-M1-H3
tcggacaatctctgaatacctcatctctgaagaccttccagatgttgatatttctgttgtcggtgtcaccagcttcagtggacccgaaggcccctttgatgtggatgtctttgactctagtgtaaattacataaagttaatgaagacaatttttgacttcgaagcaataaaaaagctactgacctccccaaagtttacattttgttatgatgcgctccatggtgttgctggagcttatgccaaacacatttttgtggaagagcttg

SEQ ID NO: 30318 - DNA, 364 bp, Zea mays
  Clone ID: LIB3180-060-P2-M1-H4
aagccgccgccgctgcagtgtccatagccaccgcaggagactgaggtggggggttttgtcaagacccacaagagcaatgcgtacttcaagcgtttccaggtgaagttcaagagaaggcgcgctggcaagacagactacagggccaggataaggctgattaaccaagacaaaaacaagtacaatacacccaaatacagatttgttgtgcgatttaccaacaaggacatcacagcacaaattatctctgctagtatagcaggtgatatggttcttgcttctgcttactcgcatgaattgccactatatggttttgaagttgttctgaccaactattcaactgtctattgtactggccttttttttg

SEQ ID NO: 30319 - DNA, 316 bp, Zea mays
  unsure at all n locations
  Clone ID: LIB3180-060-P2-M1-H5
aattccacaatttttccacgcgntttttttatcccacaaccaacctggnnaaatcgcccaatttataaacacctatcgtgcttnaaacaaaaaaactacccatattatgatcctgcaacatgcanccttcacttttaactactccttgaagaccttaatttctttttttttttttaaattcatctcataaattcctttttttacaatctttttataatataacctatcatctccccatctttaatagattagtcnattttttaataatcaaatttacctctcttcaccttttttccccattttttttttttttctc

SEQ ID NO: 30320 - DNA, 240 bp, Zea mays
  unsure at all n locations
  Clone ID: LIB3180-060-P2-M1-H6
attccctttttacccactctgttttactccaccaccgccataccancgcgccgagctattaaaaagaggtcggcgggcnaaagagtantctcagacgagaagaggtgaatatgagttccggcggcggcaggggcaagcccaaggggtccaaggctgtgtctcggtcgaccaaagctgggctgcagttccccgtcggccgtatcgcgcgctacctcaaggccggcaagtactccgagcgcg

SEQ ID NO: 30321 - DNA, 194 bp, Zea mays
  Clone ID: LIB3180-060-P2-M1-H8
tcgtctagatcgcgagcggacgaccttttttttttttttatatagataggggggggataaataatatattataaaaaatttattaggggaaaaacaaataattgttagttaaaaatgaaaatatatatttttaaaaaaaaagtaataagggtaaaaataaaaaataataaatttttaataatgtatagtatgtt

SEQ ID NO: 30322 - DNA, 402 bp, Zea mays
  Clone ID: LIB3180-060-P2-M1-H9
tcgtcaacatagaaagtggaatccagtagcaacaatagagcaacaatggcgaccaagatattttccctccttatgctccttgctctttctgcatgtgttgctaacgcgacaattttccctcaatgctcacaagctcctatagcttcccttcttcccccataccttccatcaatgatagcttcagtatgtgaaaacccagctcttcaaccctataggctccaacaagcaatcgcagcaagcaacatacctttatcacccttgtttcaacaatcgccagtcctatctttggtgcagtcattggtacaaaccattagggcacatcaatttcagcaactctgtgctcctgtgatcaaaccaatactttggcaaacctttctttctactctcagcaacaacaatttt

SEQ ID NO: 30323 - DNA, 347 bp, Zea mays
  unsure at all n locations
  Clone ID: LIB3180-061-P2-M1-A1
tttatttatctccacagccaacaccacccggcgaggctactctacaaacgccaggagtaaggaataaactcactgccanccagtgaaaacgcataagtgccaccttctcctcccatnnnaatgaactgatagcactcttttccttttattttcaccacggcaaaaaaattcttcannnccatcanctnctttctttattttattcccttttttatatttacaaggagaagtatgcaccctttgaagacattcttcgtgctgctcaagaagcaattgtgctccccccatgggttgcacttgctatcaggccaaggcctggtgtctgggattacattcgggtgaatgta

SEQ ID NO: 30324 - DNA, 358 bp, Zea mays
  unsure at all n locations
  Clone ID: LIB3180-061-P2-M1-A10
ttttctacccacttcttttctcgctgctcaagcacgcntcctgcgcggggtccatattattgcacgtgttggccaaaaangccnnttcagtgtacggtgcggacccggagccggagctgctgcggctcgcggtggcggcgtcgttcccgtctcttcttttcgagatctacccgttccacgccgaggccttggccgggctcatctcggcgtccgtgcgcgccgcgctcgaggcgccgctcaactactcgcggaaccacctatcgtacctgctcccgcgcttcgtgccgcgggcgatatacctcgactcctacttgctcgccgnctacgacgtgaggcggctttggtagactctcctccc

SEQ ID NO: 30325 - DNA, 220 bp, Zea mays
  Clone ID: LIB3180-061-P2-M1-A12
ttcttattggagtaaacctattttcgtgtctgggggatcaggaacctacttggaacaacccaaggtttggtgactatgacaatgtaaataatagaggtgggtttggacgcggaaatcaaggcagagggagagggatgagttttgggggagctggtggatcatcatggaatgatggcaacatgaaccggtgcatcaagtgggggaaggtctgaaaaacctt

SEQ ID NO: 30326 - DNA, 339 bp, Zea mays
  unsure at all n locations
  Clone ID: LIB3180-061-P2-M1-A2
ttgctaagcagcacagggtggaccttgccaagggtactgtcaccgagccgggcagtcgaattacaccntcagatattgaggcggctgccggaatcaagccgaagtcagagcccactcctgctgttgctgctgctgcgccatcacctgtggctgcgccttcagatagagcggtgcctcaggcagcagtgctgccgccggttcctggcgcgactgccgttacattcactaccaagcatgctccagtgaccaaaatcaactttgggatctaagcagcagggacacgtggtgtaattttcacacttttattctttaattttcatcagctttattaatatgttt

SEQ ID NO: 30327 - DNA, 391 bp, Zea mays
  unsure at all n locations
  Clone ID: LIB3180-061-P2-M1-A3
tttgattcagcccgttgtccccggcttgtaggcagtccttccatcaatgcgaagtggatccctcatattcnccatttcccccatcgtctccttggaaaacctcaaccccaangtcttgaaatgtgagtatgcactccgtgtctttattgtcatccatgctcaacacttgcagcaacaactacaaacacaaccagggtctcttccttttgatgagatcctgttctgcaacattgggaatcctcaatcccttggtcagcaacctgtgacgttcttcagagaggttcttgctctttgtgatcatccatgcctcttcgaaaaaaaggaaaccaaatcattgttcagtgctgatgctatttctcgagcaaagcaaaatctttcaactattccttta

SEQ ID NO: 30328 - DNA, 400 bp, Zea mays
  unsure at all n locations
  Clone ID: LIB3180-061-P2-M1-A4
tctgtgccctacatctccatgggcgcgctcctgaggcaggagctcaacccaggctcgcaactctacaggaagattgcaaactctgtgaatgaagggaggcttgtgccggaggacatcatatttgggttgctgacgaagcggcttgaggacggatacaacaagggtgaaaatgggttcattcttgatgggattccacgcacccgtatgcaagctgagattcttgacgagattgtagatgttgnattggttcttaatttcaagtgtgctgatggctgtttcatgaagaagcaatcgagaggcaacatctgcgcccactgtggacagctctttgacgtcagcaattcagcatctacgaactgtagccccagcctcgggagctatacatggcattctcaggcag

SEQ ID NO: 30329 - DNA, 386 bp, Zea mays
  unsure at all n locations
  Clone ID: LIB3180-061-P2-M1-A5
tatcttgctctacggattcgtcggtggcacggagggactgtttgcaaacaagacgttggagatcacagacgatgttcttgcttcctataagaaccaaggtggtttcgatttgctcggtaggagtatcgatcagatccgcactactaagcaagtgaatgctgcaatgacaacatgccacagtctgaacttggatggagttggtcatcatttgaggtgtgacctccaattcagatgctgcacagcttgcggagacccttattcagaataactgtaagaccaaggttgctggtgtgccactttcattgaatggtgaccttaagaaccagtttgttgtaacaacagttggatttgatacagtntgtaaggttaattgacagcttgtaagc

SEQ ID NO: 30330 - DNA, 389 bp, Zea mays
  Clone ID: LIB3180-061-P2-M1-A7
gctccttctgctccctgttgaccattggtattgtgaaccatcgaccatggctgcaagctgactgcctccacagtcttcgcgaacgccttggtgccaccttctcctcccatcccaatgaactgatagcactcttttccaggtatgttcaccagggcaagggaatgcttcagcgccatcagctgcttgcggagtttgatgccctgtttgatagtgacaaggagaagtatgcaccctttgaagacattcttcgtgctgctcaggaagcaattgtgctccccccatgggttgcacttgctatcaggccaaggcctggtgtctgggattacattcgggtgaatgtaagtgagctggctgtagaggagcctagtgtttctgagtacttggcattc

SEQ ID NO: 30331 - DNA, 331 bp, Zea mays
  unsure at all n locations
  Clone ID: LIB3180-061-P2-M1-A8
ttcgaaaccgaaagagaggcanagcttggggtggatctcccgtggggaaggctgctgccgctgctgctggtcctctccgtctcgtcctcgtcatcgtcgtcggctgctgccacgctcgccgtcagcgctccgcccccactgcctgttcctcctcctcgtcatgctcaagacgccgaaggcatgctcatcaacggcaacttcgagacggcgccgcggaagctgaacaagaccctgatcgtggggcgccactcgctgccggggtggacggtgcatggccacgtggagtacgtctcggtcggtccccagcccgggggcatgttctttccggtgc

SEQ ID NO: 30332 - DNA, 395 bp, Zea mays
  Clone ID: LIB3180-061-P2-M1-A9
ctcgctgctcaagcacgcgtcctggggggggtccatcttcttccagggcggggccgcggaggccggggcagtggacggggcggacccggagccggagctgctgcggcgcgcggtggcggcgtcgttcccgtcgctgcggttcgagatctacccgttccgcgccgaggccgtggccgggctcatctcggcgtccgtgcgcgccgcgctcgaggcgccgctcaactacgcgcggaaccacctagcggacctgctcccgcgctgcgtgccgcgggcgatatacctcgactccgacgtgctcgccgccgacgacgtgaggcggctctgggagacgcgccttcccgccgccgtcgtggtggcggcgcccgagtactgccacgccaacttctcccgctact

SEQ ID NO: 30333 - DNA, 110 bp, Zea mays
  Clone ID: LIB3180-061-P2-M1-B1
ggggggggggggatttttccccttggtaagacaaccgccgggcggaacctttccggctttcccgggttacccaaaaaattggtttaccacggggtacccggcacgcgagg

SEQ ID NO: 30334 - DNA, 273 bp, Zea mays
  unsure at all n locations
  Clone ID: LIB3180-061-P2-M1-B10
aaacggcccgcctcaatacctttccgtaattccctttcttcccactttcttttccccgccccacnctcaaaanccacgaangtctttccagaccgtcagcccccccccaacacccctcccntctcacccatctttccccctttccctcctaaacccttctttttccctatacacctcccacctcctttttttttatttcatgcacacaaaacacctcaaccctccttccccttcctccaccaccccctcccctatcattcacttcttcctcta

SEQ ID NO: 30335 - DNA, 267 bp, Zea mays
  unsure at all n locations
  Clone ID: LIB3180-061-P2-M1-B11
ggaaagctggcacgcctgcatgtaccggtccttaattcccttttctacccactcttcctttccatttcgatctcncaaccaccttttggtttgttctaaaaagtatcgaatagctacaaaanatattcantttgcactttcattggacaccaactcaagtcctcaccaaataatatcttgtgagggtgatttttattttttttttgaaaaattaaaaataacacgcttaaagccctataaagcttttataaatatctgcttttctta

SEQ ID NO: 30336 - DNA, 399 bp, Zea mays
  Clone ID: LIB3180-061-P2-M1-B12
tttaccttgggcttgatcgagaacagcactggctcttcaacgacaaagaaggatccgtccgtcccatagagcgaggatcactcaccgacacgagtagcaaggagtcttcaccgcaccccaacagagagaagagcggcggctggcggaggatctgacggcaaggaggtagcggccctgcgcttggtggcggcgaggcgctgggcctcttggggttaacgccctgtcgcgcagctaaaacgaacaactctcaccgacgctcttgcttcgtagctcgccaggcccagtgaggcccaacaccacaggagtcaatagcgcagtgaaaatttcctcctgggtcggccgcgcccaccgacgctctccgtctccgtctccggtgatgctgccctcgtcctcacgggt

SEQ ID NO: 30337 - DNA, 305 bp, Zea mays
  unsure at all n locations
  Clone ID: LIB3180-061-P2-M1-B2
tactatatcggatccaattataacaacctcgttgattattttacataacgcagccgcgtaactattaaccgctncaattctctgaactccgctccgcacgtttagaactctaattatctcctcatcactgcaagcctttttatttatcttctcatgaaaaatattggcttcagaatgagccaaagatgtgttcacctctgggccatcatagcggtactcactaacaagaggcactaaaagctttctgaagtctccattgacattctcaacaacgtgggcctggagcgatcacttaaacctgtcat

SEQ ID NO: 30338 - DNA, 223 bp, Zea mays
  unsure at all n locations
  Clone ID: LIB3180-061-P2-M1-B4
tcgctcctctccggcgctgtctctcctccagcngctccttcatatcctagcctgtgcgcttcaactcaccctccctatcntctcctcccccaccaccactcctaccctcatactctctcttcctcgcttgccnaataattttttttttttctacacaccaaaaaaccacccccccttcctctttttttttacaccttattcctttattttatcttttcttttt

SEQ ID NO: 30339 - DNA, 399 bp, Zea mays
  Clone ID: LIB3180-061-P2-M1-B5
tttctatcggccgccctttttttttttttttgtatgcctcattattccaatggagtggattaaaggcttgccagcctttcagtacacatagaacgtcaatattcatgtcaacgcagtcagtgtataggcaacaaactcttgccgcttgtacaactttgttgcctacgagccagcgtaaactacccaccacccaacgtgtagtagctctgaagagaacatcaaacagcatccagttcttccctcactcagagagtgaagtaaaccggcggtggatggacgatttccatcttcgacctcgtgacgttgccggtgagcacactctccgacatggcctcgttggcctggaaaggctgtacctgcgctatcctctcagggatcgcctgaccctcctccactcga

SEQ ID NO: 30340 - DNA, 280 bp, Zea mays
  unsure at all n locations
  Clone ID: LIB3180-061-P2-M1-B6
ccccccctttcatttcacatacaaccccaatatccatatcaactcaatctattttttggcaacaaactcttttttttttttcaactttnataccaaccacccaactttaacttcccaccacccaacttttactatctcttaatataacatcaaacatcatccacttcttccctcactcacatatttaattatacctcctttttatatactatttccatctttcacctcttcactcatccctttatcacactctccaacttatctctcttttctctcaaac

SEQ ID NO: 30341 - DNA, 57 bp, Zea mays
  Clone ID: LIB3180-061-P2-M1-B8
ctgcagtaccggtccttaattccctttctttccacttctttttttactcagaaggaa

SEQ ID NO: 30342 - DNA, 294 bp, Zea mays
  unsure at all n locations
  Clone ID: LIB3180-061-P2-M1-B9
tcggctacgtcccacgctcaaaaagcacgaagcgctttcctagccggcgggcagcgctcctcacctctcccncctcacccatcgtccccccgttcccggctaaaccctgcttgagccctagacaccgcccgcctcctttttttttagagcatgcacgccagattcctcagctcgccgtcccctgcctccgccgccccctccccgtacgttcgcttggccttcacggtcgcccgcccgcgcctcgcgtgttgtaagcctcgaggcccctcttccgcgccggcggctggccctctc

SEQ ID NO: 30343 - DNA, 162 bp, Zea mays
  unsure at all n locations
  Clone ID: LIB3180-061-P2-M1-C10
ttttctacccactcttcttttccaaacctgaccctctcnccgtcgctgtgttcctaaacacaagatgcgcccccaacaaccnncttnctcnccnctaatactacttctctcaataactacatcctcccatatttttcatcactccctccctatctttttttt

SEQ ID NO: 30344 - DNA, 144 bp, Zea mays
  unsure at all n locations
  Clone ID: LIB3180-061-P2-M1-C11
tgctcatcctctgcctgccccgcttgcgcagcgcgtctgctctagtgaggggagacggagatccgccagagattgaggagagggagggaggctgcctnnccggggagcgtttgctgcgagggatggactgncactttttttttt

SEQ ID NO: 30345 - DNA, 144 bp, Zea mays
  Clone ID: LIB3180-061-P2-M1-C2
cgtgagtcactggcacccgctcctccgccggcggcgatcctataccggtccgccgagaaaccccctccttatcactctccaattccccttcacgactaccaccacccgccccctccctcatgctgctcctgctgcttctctttt

SEQ ID NO: 30346 - DNA, 394 bp, Zea mays
  unsure at all n locations
  Clone ID: LIB3180-061-P2-M1-C3
tgtactcacaaacagcgcgcgcttaaaggcctttgttttttgagataacaaggaggagaggagganatggcggtcacgatcacgtgggtgaaggcgaggcagatcttcgacagccgcggcaaccccaccgtcgaggtggacgttggccttagcgacggcagctacgcgaggggggccgtacccagcggcgcatccactggaatatatgaggccttggagttgagggatggcggatctgtttttttcgtcttggatgtttattactttactggccggggggtgggtgggggggtgaaagctagctaggatctgaatgctaaacttctcaccccttgccatttttatctagtcattcttggagaccaggagctggacacccttatcaagggcacca

SEQ ID NO: 30347 - DNA, 364 bp, Zea mays
  unsure at all n locations
  Clone ID: LIB3180-061-P2-M1-C4
ttttattctcacaccactcacattgttgcaggagagaacacttcgctttcagggacggtcaaatgagctcatggatcattttcccttcgcttggttacccatggaccccttcacagccatggcgctcagcggtaccctctcaccctcattctctaccacatctaccaatgataccatgtacaaccttaacccagcgttgtatgcatccctcgtgccaccaataaggaaacctgcaaccccgaccacactagaggtagggaggcaatgcaaggaggaggaggatgcatccattcntctggtgcacctgcttatcacttgcaccaattccattgagactgttgactactcgatcgcacaaagaaac

SEQ ID NO: 30348 - DNA, 377 bp, Zea mays
  Clone ID: LIB3180-061-P2-M1-C5
tctccgtagctcccaaatagatcgatccatccggcggtgagcggacacggcagtggaagcccacgcctcgcggggccgccgcaccctggaggagatccggcagaagagagccgccgagaggatgcagcacgccctcccgatcgcggcgtctcacgtcgactctcacgggaaccaaagagccggagctgagcttcttgctcgagttcaagaacttgaaaatgggaacacggaattggtgagggaaaacaaaatgctcttgtccaagattgatgagaagggagttgagaaggatgcccttgtaaaccgtttgaatgatcttgtgagtcaagagtatatttgtataggtgctgagctccaggtttggttcttttattttt

SEQ ID NO: 30349 - DNA, 301 bp, Zea mays
  Clone ID: LIB3180-061-P2-M1-C6
caaattccaaattattccaaaaccacttcaaactgcccattcatttttctttaaaatttcttttctaacatttttattccattagctttttccttttttttttcaattacatacttcaacttctacttctcctatacttctttacctaaatataagcttctttccctcctattattttaacattacttttattgcattccggtcgtttttctctttactatttctaatttttccttcttcttctttcatattcatatctttttttattctttcatcttaattacattcatcttcacttttt

SEQ ID NO: 30350 - DNA, 187 bp, Zea mays
  unsure at all n locations
  Clone ID: LIB3180-061-P2-M1-C7
ttcgnctcgctcgaggggcgtcccggtgggggtgctagtggtttttcgaactcctgggtggctccttaaatccnncttccncgtcctcntaccccgcaagggtggtgagcgttttcctctccaatgcggcttcggcggnggtttatttttttttttcgctcaaataaaaaaccaacatatctagcct

SEQ ID NO: 30351 - DNA, 395 bp, Zea mays
  Clone ID: LIB3180-061-P2-M1-C8
tgatcattgacacctacggtggctggggagcgccatggtggtggcgcttgctggggcaaggacccaaccaaggttgaccgcagcggagcctatgtcgcaaggcaggctgccaagagcatcgtcgccagcggccttgctcgccgcgccatcgtccaggtgtcttacgccatcggcgtgcccgagcctctctccgtgttcgtcgacacgtacggcaccggcgcgatccccgacaaggagatcctcaagattgtcaaggagaacttcgatttcaggcctggcatgatcatcatcaaccttgacctcaagaaaggcggcaacgggcgctacctcaagacggcggcctacggccactttggaagggacgaccctgactttacctgggaggtggtgaagcc

SEQ ID NO: 30352 - DNA, 404 bp, Zea mays
  Clone ID: LIB3180-061-P2-M1-C9
ttggcgaaaactcagtgtctcgagtttgctcggagcggaggcgatggctgggaagggagggaaaggcttgctcgccgcgaagactacggcggccaagtccgccgagaaggacaaggggaagaaggccccaatctcacgctcctcccgcgccggcctccagttccctgttgggcgtatccaccgtcagctgaagcaaaggactcaggcaaatggtcgcgttggtgccaccgcagccgtctactccgctgccatcctggagtacttgactgccgaggttctggagctggctgggaatgctagcaaggatctgaaggtgaagcgtatcacccctcgccatttgcagctagccattcgtggagacgaggagctggacaccctcatcaagggcaccatcgcaggcggag

SEQ ID NO: 30353 - DNA, 130 bp, Zea mays
  Clone ID: LIB3180-061-P2-M1-D1
agccttctttctttgggaaccgggggcaggaaaaaaggagggggaaaaaaaaacaagttggcggaacaattttcccttacattttgatccaaccttgcagggtttaatccaccaaatttcaaccgaaaat

SEQ ID NO: 30354 - DNA, 427 bp, Zea mays
  unsure at all n locations
  Clone ID: LIB3180-061-P2-M1-D10
cctttcctgaattcccttttcttacccactttttttcatcactctatnctaantctaagtgtaagggttttaaaatttgcttgttagaccacctncccaactctaattccaatgctacaatcctattgttttactgaatgacggtgtctagaccgaaacgctgaaatgtttttttttacttccttcgataacataaattgttcactcttataccccatgcataaaaatatcttgttctttacaataaaataatagaaaaaaattaggtgtatctctatctctattactaatattcaaattcttgatttcctttccttggaaaataaattatttcatgacaagtgcaccgttataaattttactaaatattatctttatccataactcatacactttcttgataaactactttatacatttcattttt

SEQ ID NO: 30355 - DNA, 76 bp, Zea mays
  unsure at all n locations
  Clone ID: LIB3180-061-P2-M1-D11
ttctttttccacctccagtcgccctacctggccggggttcttctaaggatggtggggtgctacctcnncacnatcg

SEQ ID NO: 30356 - DNA, 398 bp, Zea mays
  Clone ID: LIB3180-061-P2-M1-D12
gcagggtgctcactaacgcccactcggttgagcattacacccaggtgaagctcaagaagcgtggctcggacaccaagtaccttgcgactgtccttgccataggcaccgagtgtgacattgcaatgttgaccgttgaggatgatgaattctggaaaggcgtttcacctgtagagtttgggtcgctgccagcacttcaggatgccgtcactgttgttggttacccaattggaggcgatactatctcggtgactagtggtgtagtttctaggatagaaatactttcatatgttcatggttctacagagcttcttgggttacagatagatgcagctataaattcaggaaattcaggggggcctgctttcaatgataagggaaaatgtgttggtatagctttc

SEQ ID NO: 30357 - DNA, 395 bp, Zea mays
  unsure at all n locations
  Clone ID: LIB3180-061-P2-M1-D2
ttcttcatagaaagcacaatantgtaccaagagatggcagccaaaatattttggctccttatgctccttggtctttctgcaagtgctgctacggcgaccattttcccacaatgctcacaagctcctatagcttcccttcttcccccgtacctctcaccagcggtgtcttcggtatgtgaaaacccaattcttcaaccctataggatccaacaggcaatcgcagctggcatcttacctttatcacccttgttcctccaacaatcatcagccctattacagcagttacctttggtgcatttattggcacaaaacatcatggcacaacaactacaacaacttgtgctagcaaacccttgctgcctactttaagcaccaccagttttttcaattcaacc

SEQ ID NO: 30358 - DNA, 403 bp, Zea mays
  Clone ID: LIB3180-061-P2-M1-D3
tctcccaccgtcggtacagcagcgctgccctcttgcgcggtgggtttaagaagcgcccggtgggatcactcctcttcttccccggtcgtcgtcctatgcttgtccctgtctcggcaattctgggatactaaagaggaatcggtgattgtccggtcttcgaacccccgagatttgcatgtgaatcttcctcttcttctctttcgcctacatggcgtctctcgctgcgagccactacatcaagcgagtctagctcgcgcgacacacaatcatcagccatattgcaggaggggaggtgcggcatttattgtcacaaaacatcacggcacaacaactacaacaacttgtgctagcaaaccttgctgactactcttatcatcaacagtttttttcattcaaccaacta

SEQ ID NO: 30359 - DNA, 142 bp, Zea mays
  unsure at all n locations
  Clone ID: LIB3180-061-P2-M1-D4
tcgttcatgttatgtagaggaattgttcaagtctgtttatctttcttgtnagaagggcacagcatattccttggttatggatatgtgtgttgggtaactgggcattcacgttttgtatctgtgggagcaaggtccatttttt

SEQ ID NO: 30360 - DNA, 396 bp, Zea mays
  unsure at all n locations
  Clone ID: LIB3180-061-P2-M1-D5
ttgcttatcttgaagtaactgacatagctgggctgtattataggtgcccatgcgggggatggtctgggcaatgcattcctctcacatatacgtgctgttgatggaatcttccatgtcctaagagcatttgaagacgcagaaattactcatgttgacgatacagtagatcctgttagagacatggaaactattagtgaagagctcagactaaaggatatagagttcatgaaaaagaaacttgaggaccttgataagtcaatgaagaggagcaatgataagcagctcaaaattgagcatgaattatgtgagagggtcataggccatcttgaggaagggaaagatgtccgnttaggagattggaaagctgctgacattgagatcttgaattcattccag

SEQ ID NO: 30361 - DNA, 457 bp, Zea mays
  unsure at all n locations
  Clone ID: LIB3180-061-P2-M1-D8
tgtctctgttcacgcccctgtccgcggcgaagcttggtggcctccnccggcagtcgggcggtgtggtgcgtcgtcggcccgggtaagatgnngctggcggcttcagggtaccttcatcntggtcagagccactnnttctggctttcnnttgccagagagtgcatgagtcgtcggataggggaagatacccatntnncagagaannaaagttatctacanctgtnntatttctctcttcaattttnntctggtgtgccagcccagctccnncactctatggcattcnnattcgacgactgganngctgatcctttctacctggatgccgtgttatgcctcgcatcataaccgtggcacctgtgatggagttgggtattactccaattgtgacctctggtatggtaatgcaacttcttgtcggatcgaagatcattgaagttgacaacagtgtgagaga

SEQ ID NO: 30362 - DNA, 394 bp, Zea mays
  Clone ID: LIB3180-061-P2-M1-D9
tcatttctctattctaagtctaagtgtaaggagtttcttcttttcttggtagaggacctggccaactctaattccaatgctgcaatcctattggtttactgaatgagggtgggtagaccgaaacgctgaagtgttgttatttacttccttcgataacatagattgttcactcttatgccccatgcataaaaatggcttgtgctttagaataaaagaatagaaaaaaagtaggtggatcgggatcgctattacgagtattcgagttcttgttttcctttccttggaaagggaattatttcatgagaagtgcaccggtagaaattggactaaatatgatcttgatccatagctcgtccactttcttgataaacgacttgatgcattgcattttctc

SEQ ID NO: 30363 - DNA, 156 bp, Zea mays
  Clone ID: LIB3180-061-P2-M1-E1
tggaccaacccgtcttttttttcaatttcccaatttccaaaatcgaatgggggagttcttcctcctttgccgccatggcgctctttgtggagaagacctcgtctggacgggagtccaaggtcaaggatctctcgcaggcggacttcggtcgcctcg

SEQ ID NO: 30364 - DNA, 393 bp, Zea mays
  unsure at all n locations
  Clone ID: LIB3180-061-P2-M1-E10
tgntcttttgctcatgactggggtnagcaagaggcttttcacaaaccctggggggtcgtctaacacgtcncggtcactctgtggtcggttgtggccgttccgccgagcatctccgctccctcgaggcagagatcacgtcacctttgcgccacttccttaccgttgccgatgtctagccagtggagctgattatcgtctcagactatggactagaacagtctgtgcatgagttgctggagcattctccacattgaagaactggtttccaccatattaaaaatggggagatgagagatctgacagcantttgtccgagcttgcaatagtctgttttataaaataagcaagttccatatattatagtaaaacaatgctggttcatattaacaagaa

SEQ ID NO: 30365 - DNA, 425 bp, Zea mays
  unsure at all n locations
  Clone ID: LIB3180-061-P2-M1-E11
tnctgatcgtcagctcggccacattcccggtagaggtgtccagtaagcagatgcaggtggtccctgtgggcgggaggcaggtataccagatcgtactccacgctatctactgcatcctcaagaaggagggcgccggctgtctgtacctaggtctcggccctagctacatcaagctcatgcccgccgccgtcatcatcttcatgtgctacgaggcttgcaagaagatccttttttacaatgaggttgatttttattatttctttttaattttattgtggggggggttggtttatttttttctttttattcatattatttttttacatatttatatttattatattatatatataattttatttttattaatatttataattttttatttactaattttatttttataattcactttttctttttat

SEQ ID NO: 30366 - DNA, 383 bp, Zea mays
  unsure at all n locations
  Clone ID: LIB3180-061-P2-M1-E3
acccacagnccacacgggacgacctttaaaaaatggggggccgcctccacacacncttnctccctcatgccatccatcctatccgatccgatcctatccgatccaagcgtccatcatgtgggtgacttttattccgcatgtgtgggacaaaaagatcgcgcccattcgctccccggttaccccgtctccatccgctgccatgctgttctctctgacagtgtggctgtcccgtaccgtgcatcctcatcctccctctccccatgtgtgcagcacctctatataccctcccttgacagctcccagtctcatgctccactactgactacacctcttctactgctatatctctcttccccattaccaatctaatttctatttctttt

SEQ ID NO: 30367 - DNA, 300 bp, Zea mays
  Clone ID: LIB3180-061-P2-M1-E4
tctgcggcctcgcctgggccacggacgacgactcccttcacaacgcctgtgaggacctacggcgaggtcctcgagtccaagatcatcctcgatcgggagacgcagaggtcccgcggcttcggcttcgtcaccttctccacggaggaggcgatgcggaacgccatcgagggcatgaacggcaaggagctggacggccgcaacatcaccgtccgcctcccggtccgcgccgccaggatctcgtgcgcggcgttggatgctccactccccttgtcttcaggggggggggggggtgttttttat

SEQ ID NO: 30368 - DNA, 404 bp, Zea mays
  Clone ID: LIB3180-061-P2-M1-E5
ttcccgacccatcatgcgccaggcgaatcaaaccactacctgatttgtttaccccccgaaaatttgccgtctcctcgtctcgctcctctccctgcgcagcccccagatccggcaccgcccgctcctcgatccccgcaccccacgcccgcaggccgggaccggcggggtcgcgcgccgggtaggaggaggagaagaggaagggcggtatcgcggcgccgccggcgagggcccgggccgactacgactaccttatcaagctgctcctcattggagacagcggtgttggcaagagttgcctcctgttgcggttctctgatggttccttcactacaagctttattaccacaattggtattgactttaagatacgaacgatagaattggatggcaagcgtataaagcta

SEQ ID NO: 30369 - DNA, 285 bp, Zea mays
  unsure at all n locations
  Clone ID: LIB3180-061-P2-M1-E6
ttcctttacccatcatgcgccanncnaatcagaccgcttccttattaagttagccggcgcaaatttaccctctcctcntctctctcctctccctgcccatcccccatatccttcacctcccgctcctcgatccccacaccctactcccgcatgccgttaccaacaaaatcgctcgccctttatgaggaggagaagaggaagggctgtattgcttctccgccttctatttcccattcccactacaactaccttatcaatcttctcctcatttaaaacagcggtgtt

SEQ ID NO: 30370 - DNA, 191 bp, Zea mays
  Clone ID: LIB3180-061-P2-M1-E7
actagttctagatcgcgagcggccgccggttttttttttttggtgggtgggtttttttattaaccaaaccgtttgttttattcgtcacgttctccgagaaccggcgcatcgccgtgcgggcatggacggatgattttatttacagccatgcggtatatcttgattggtgttactacggcctttgtcagaag

SEQ ID NO: 30371 - DNA, 396 bp, Zea mays
  Clone ID: LIB3180-061-P2-M1-E9
ttttgtgctcatgacgggggtgagcagggggcgtggccgagccctggcgctggacctgccccgtcccggccacccggtggtcggttgtggccgttccgccaagcagttccgttccttcaaggcaaaaataacgtaaccgtgggccaatttcttaccgttgccgatgtctaaccagtggagctgattatcgtctcaaactatggactagaacagtctgtgcatgagttgctggagcattctccacattgaagaactggtttccaccatattaaaaatggggagatgagagatctgacagcagtatgtccgagctggcaaaggctgttttggaaaagaagcaagttccagatattatagtaaacaatgcttgttcaataaacaagaataacaagacat

SEQ ID NO: 30372 - DNA, 322 bp, Zea mays
  Clone ID: LIB3180-061-P2-M1-F1
gccgcccgcagtcccgtccgatttcccggttcgacctacccgtcttttctttaagaccattagctttatctactggggagcgcaaaagaacccgttggacaccatgagggtgttgctcgttgccctcgctttcctggctttcgttgagagcgccacctccactcatacaagcggcgcctgaggctgccacccatcgccgtcggttgatgtaccgtcgccggtgcatctgactattgcggttcactttggacttgagcagcatgtgcatgagtcgctgcagcattctccacatttaagaactggtttccaccatatttaaaat

SEQ ID NO: 30373 - DNA, 238 bp, Zea mays
  Clone ID: LIB3180-061-P2-M1-F10
ctcatctgcgtacacgctctccctgttcgtttctttaataaagttaaagttaggcaacaattggtttacaatccttaattcttaagtttgcaacactaatcttcatttcacatttctaccggtattcacttttttttttttatatttactaaagtataaaaaaactcttaatcattttattatttattatatactatttttctactcttatttctcattatattattttattatctta

SEQ ID NO: 30374 - DNA, 422 bp, Zea mays
  unsure at all n locations
  Clone ID: LIB3180-061-P2-M1-F11
tgttcggttttaagccggtgctccatgtgtgcctgcccttttcccgtcccgggtacgttttaagctgcnagcgagatctgctttcacagcgtggctgaccagcagatccgtcgttgccggaacccacgctcgccgtctgttattgcatctgtagcctgctcttaaaacacacggacaattggactagctagactcttcgtttccggctaatggggtgctccttcatcatgtgcttgaacgcacttgttctacaccttaagtaagtcatttttactttcttcgtgggggggtggtgttgttgttccttttaaaaactatttatagtttctttattatctttttttttgtttatttcttatgataatattatttatttattttatatctttttttatattaatttatatatttttttttattct

SEQ ID NO: 30375 - DNA, 369 bp, Zea mays
  Clone ID: LIB3180-061-P2-M1-F12
gaacttgggggcgcttcagctcagcttacctttgtttctgatgaaggacttccacccaaactgtcatataattatacttttggtgaaacaacatacactctctataccaacagctttttaaactttggtcaaaatgcagctcaagactcattccatgaaatgctgaggtcaagaggctctttcaaaaatggtacacttgctgatccttgtgctcccagaggatattcacgcaatgaaggtgcttcaaggtcaacattagagaaccagtatgttaataatgggactggaaactttacagagtgcatatcttcttcacaacttttactgcaaaaaggaaaggattagtgccacatgtatctcatataaatg

SEQ ID NO: 30376 - DNA, 397 bp, Zea mays
  Clone ID: LIB3180-061-P2-M1-F2
tttgttcgcacacacacacaaccagatctccgcgggtccacccgtcggcacgtccggttcaagatgcagatctttgtgaaaaccctgaccggcaagactatcaccctcgaggtggagtcgtctgacaccattgacaacgttaaggccaagatccaggacaaggagggcatccccccagaccagcagcggctcatcttcgctggcaaacagcttgaggacgggcgcacgcttgctgactacaacatccagaaggagagcaccctccaccttgtgctccgcctcaggggaggcatgcacatctttgtgaaaaccctgaccggcaagactatcaccctcgaggtggagtcctctgacaccattgacaacgtcaaggccaatatccaggacaaggagggca

SEQ ID NO: 30377 - DNA, 304 bp, Zea mays
  Clone ID: LIB3180-061-P2-M1-F3
tcactcacacttgagccccacccgtgccgcgccgtgcccgcatccctgagcctgactctggcgccgccgccgcccatgtccgccgccccgccccgccgcgtggtcatctgcggcgagttcgttgacgccattgacatcgttattgtctcgtgccaggacaaggaaggcatgcccccagaccagcagcggctcatctttgcttggcaagcagcttgtggactgacgcacgctggctgactacatcattcagaaggagagcaccctccacttcgtgctggggggggggggaggcatgcatatcttt

SEQ ID NO: 30378 - DNA, 355 bp, Zea mays
  unsure at all n locations
  Clone ID: LIB3180-061-P2-M1-F4
tgntgatgggccctcgtctaaggactggaggggtggaagggctgctagtttgaacagcattcccagcagcactggagctgctaaggctgttggcaaagtgcttcctgtccttaacggaaagttgactggaatgtctttccgtgtcccaaccgtcgatgtttctgttgttgatttgactgttaggcttgagaagtcagcaacctatgatgagatcaaggctgcggtcaaggccgaggcagaaggtagcctcaagggcatcctgngttacgttgaggaggacctggtttgcaccgatttccagggtgacaacaagtctagcattttttgttgctaatgctggcatttcccttgaacg

SEQ ID NO: 30379 - DNA, 405 bp, Zea mays
  Clone ID: LIB3180-061-P2-M1-F5
ggaagagatcctgcacaagcttctgcggagcatcagtacacttcccctaaggcaagacagagtcaatgggatcgaggtggaccaaatgcgccaagccaggttccatcatatgcatataacgaagcccaaggtgctggaggtgcgcaatccttttatgatgggcagagatctgatacaaaggttggtctagaaaagcagcccagcaaggagtctagggagcaacctcgtactgaacgaactgaaacaagatacgagaattataatcttcctcggacattcgaaggtcttgaacaaagtttccatgaagacattattttgctatccaaggaactacaggaggcagaggatgctgaaaattctagacacatggagaggatgaaggatataaatacacagtaccaggag

SEQ ID NO: 30380 - DNA, 418 bp, Zea mays
  unsure at all n locations
  Clone ID: LIB3180-061-P2-M1-F6
ntttttcgtctagcagcattccacagncctgaatccggcaggccttcaccacccagcggggatggccggctacgacggacgtgctccctccggcctccgcgtggtgatgttccccttcccgttctggagccacattaaccagatgctccagctcgggaagctactacgggcgcggatcctgtgcataaccatgcttcaaaccgacttcaacgcgggcgactaccggagtaacctcgtacttaaccttctggtacatgacacgatacttatcatcttacttcgacattcgaaggtgtttaacaaagcttacatgacgacattatcttgctatccaaggaactacaggaggcagaggatgctgaaaattctatacacatggagagattgaaggatataaatacacagtaccaggagaaac

SEQ ID NO: 30381 - DNA, 399 bp, Zea mays
  Clone ID: LIB3180-061-P2-M1-F7
tctgaagctcacaacaatctccaccctgggaaaatctatgtgaacaaaggtgacctccttgatgccggtgtgaatcgcagcccaagtgcatatctaaataaccccgctgaagagagaggcaagtataagtacaatgttgataaagaaatgaccctcatcaagtttgtacatgacgagtctggtccgattgggagtttcaattggtttgcaactcatggaacatctatgagtcgtacaaattctttgataagtggtgataacaaaggagcagccgcgcgtttcatggaagattgggcagaacaaaatggcattccaaaacaggcagctcatgtaaatcatgatggtttggaatctttacacatgacctctcgacttccgagaagagtctcaccaataatt

SEQ ID NO: 30382 - DNA, 188 bp, Zea mays
  Clone ID: LIB3180-061-P2-M1-F9
ttctttaactgtgacattccgcatgtgaaccggggggagtatcaaatgattgatatgtcttaaaattgatttgtgagccttcttacttcaaatggcaacactaaagatgatcttaaactcccaactgatgagactcttgttgcccagattaaggaaaggttcaaaagcgggaaggatcttgttgtgac

SEQ ID NO: 30383 - DNA, 402 bp, Zea mays
  Clone ID: LIB3180-061-P2-M1-G1
tttcttaacgtacccttttccgcgccgccaggtgggggaggaagaagacgcgggggcccaaggaggagaacgtgacgcttggccccgctgtccgcgagggagaacacgtctttggcgttgcgcacattttcgcctccttcaacgacactttcatccatgtgacggatctgtctggaagggagacgctcgtgcgcatcactggcggcatgaaagttcaagctgatcgagatgagaactggccttatgctgctgtgctcgtctaacaggatgtggtgccacgatgcctggagcttgcacttgccgcattgctacatcagctcgactctgataaccctgacatgacccaaacccctggccctggtgctcagtctgctcttagagctcttgctcgatctggcatga

SEQ ID NO: 30384 - DNA, 156 bp, Zea mays
  Clone ID: LIB3180-061-P2-M1-G10
gtccaattcccgtgacccactcccacgagccgcgcgcccagagcactccgtgtgcacgagtttacctcaccctttgcgcgcgaagactgtgtgccttcgcgtccctacagaagccaagaggacgcgaggaagcgaagcacacccgcagcgacagca

SEQ ID NO: 30385 - DNA, 395 bp, Zea mays
  Clone ID: LIB3180-061-P2-M1-G11
cagctgacaaaatggatctggggtttgagacagtacaggagggacatgatgttccatttggttccttctttgaggtgcattgtaggtggtctgtgaaaaccatcagttctagcctgtgcagtcttaacataagtgctggtgcacatttcaagaaatggtgcataatgcagtctaagataaagagcggtgctgtggatgagttgaagaaagaagtcaaggaaatgttagactttgcacaggggtatatgctcaaagttaggtctccggaccaagagaacagtaatctcgcccaacaagacaacgtggcaccggatgcagtgtctggcgatcaatgattatttcaggttgtgcctcctgatttagggtggggtgacagctgccatgacaacgaatta

SEQ ID NO: 30386 - DNA, 131 bp, Zea mays
  Clone ID: LIB3180-061-P2-M1-G12
gttctacatcccgaccaaccccccgtgagtttttttacaaaacagcgagcgccccaccttcccctccttttcttaaattaccacatacaactattaactttaaaaccatcacatccaccctccacaaacct

SEQ ID NO: 30387 - DNA, 228 bp, Zea mays
  Clone ID: LIB3180-061-P2-M1-G2
tcttgttaatggagtaaactgtgcaactggaggatgccatgtctgttataggtgaggcactaactggatcccatggaaatgggctatcaggatctgtttttccaactaccggcttttcaggtgtggtagaaactgaagatggatcactggaggatggtctccgtcttcaattcccctccgcgctttcccatccccattctaaggtttcccttcctccataccaaatcc

SEQ ID NO: 30388 - DNA, 200 bp, Zea mays
  Clone ID: LIB3180-061-P2-M1-G4
tgtttatgagaacatggcggcgtggctggggcgggtaacaccctcaagatgatggccttcaagctcccgcccgtcggcccttatgatgtccgcgtgcgcatgaaggcagtggggatttgcggcagcgatgtgcactacctaatgtagatgcgcatcgcgcacttcgtggtgaaggagccgatggtgatcgggcacgagtg

SEQ ID NO: 30389 - DNA, 363 bp, Zea mays
  Clone ID: LIB3180-061-P2-M1-G5
tcttccacgcgtccggtggagatcaatgagagggcgtacgaggcaagaactggtggtgctctcgagggggtaccgcccaggcgcaggggtgagggtcaggataatatgggaaagtggcaggataactttgtctcgtcacaggggcggcagggtggtggcaaccggtttggatactccggcagaggtgcaatatctggtcaaagtggtggtggacaccagagggacaggggcaatcagggttaccgcgggggctatggtggcgtttcaaggtttcaggatgcaaggggtcgcaaccagtttaatgcatcatgcagaggtggtgatggacttgcacgcatggcgatcctgaactaggctggtaga

SEQ ID NO: 30390 - DNA, 406 bp, Zea mays
  Clone ID: LIB3180-061-P2-M1-G6
tcttcgcctttccagcatcaatgtcgagaacgttgaggagaaccgccgtgccctgcgtgagctcctattctgctgccctggtgctctccagtacatcagcggtgtgatcctcttcgaggagaccctgtaccagaagaccaaggatggcaagccttttgttgatgtcctcaaggagggaggcgtcctccctggcatcaaggttgacaagggcaccattgaggttgttggcactgataaggagaccaccacccaaggccatgacgaccttggcaagcgctgcgccaagtactacgaggccggtgcccgctttgccaagtggcgcgctgttctcaagattggccccaatgagccatcacagcttgccatcgacctgaacgctcagggtctggctcgctatgccatcatc

SEQ ID NO: 30391 - DNA, 401 bp, Zea mays
  unsure at all n locations
  Clone ID: LIB3180-061-P2-M1-G8
tctgtgcagatggatcaaaggctactggtgccttcatcttgacagcgagccataacccaggtggtcctacggaggactttggtatcaaatacaatatgggaaatggtggacctgcccctgaatccgttaccgacaagattttctctaatacaacgacaatctctgaatacctcatctctgaagaccttccagatgttgatatttctgttgtcggtgtcaccagcttcagtggacccgaaggcccctttgatgntgatgtctttgactctagtgtaaattacataaagttaatgaagacaatttttgacttcgaagcaataaaaaagctactgacctccccaaagtttacattctgttatgatgcgctccatggtgttgctggagcttatgccaaacacatc

SEQ ID NO: 30392 - DNA, 399 bp, Zea mays
  Clone ID: LIB3180-061-P2-M1-G9
tctacatcgagtacagtcggctaggtaatctggtggtacgacgactgacgacgacatgtcgtccaccatcagcaagtcgtcgtcgtcctcgagctcggcgcagcgggcagcagctgccgccctgctcgtggcggtgtccgtcctggtggtgggcgcggcggcggtgtgcgacatgagcaacgagcagttcatgtcgtgccagcccgcggcgtccaagacgacggacccgccggccgcgccgtcgcaggcgtgctgcgacgcgctggcgggggcggacctcaagtgcctgtgcggctacaagaactcgccgtggatgggcgtctacaacatcgaccccaagcgcgccatggagcttccggccaagtgcggcctcgccacgccgtccgactgctagcagtg

SEQ ID NO: 30393 - DNA, 330 bp, Zea mays
  Clone ID: LIB3180-061-P2-M1-H1
ccacacccacagcctgctgcacaacctcctggacagggcgcaactgtcaacaaccctcgctctgctggcattgagaatcgtgctggtaggtggcgcagcatcggtgctcctcatcagcaccatgctgtcagatgctgccaccccgctgcttgcaactacaatgatcctggttgccaccccatagaccggtacccagatccgcttgcgaaagccgacgctaaagacatttatttctacaaaaactagaatactatgatcaattacaaaacctaccaaaacatccctattgagaccactgcccatgatgtgcctgcaccacccaacacattt

SEQ ID NO: 30394 - DNA, 406 bp, Zea mays
  Clone ID: LIB3180-061-P2-M1-H10
tctaaaggctttggatttgatattacagctgcttgtagtgggtttttagtcggcttaatcacagctactcgctttatcaaaggcggaggttttcagaatgtcttagtaattggtgcagatgctctttcaaaatacgtggattggacagacagaggtacatgcattctttttggtgatgctgctggtgctgtgttggtacaggcatgcagtgctgatgaagatggcatgcttggtttttgtgttcaaagtgatggcaatggacaaaagcacctaagtgccatagcggctaatgacgagtctatcttgtccaataccaatggtgttccaggatttccgccaaagaaggcaacctactcatgcattcaaatgaacggaaaggaagtttttcgctttgctgtccgatgcg

SEQ ID NO: 30395 - DNA, 455 bp, Zea mays
  Clone ID: LIB3180-061-P2-M1-H11
ccggcaggtcccggaccggaccggaaggcccgtttcgacccactttttttagctgcccctttctcaccgccgcgggcggcacgcgcagcagcaaccgagcaggatcgcatccagcaagctcaggcccgagccctactgcaaccgccgctgctaccgcactgaacaccatggccgacccggcggagcaccgtccagcggaggaggacgaggaagccgcggcggccggcgaggatgaggacaccggcgctcaggtcgcgcccatcgtgaagctggaggaggtcgccgttaccaccggagaggaggacgaggacgtacttgtcgacatgaaggcgaagctctaccggttcgacaaggaggcgaaccagtggaaagaacgtggcacaggcactgtgaagctgcttaagcacaaggagaccgccaaggtccgcctcgtcatgcgtcaggcgaagacgctt

SEQ ID NO: 30396 - DNA, 322 bp, Zea mays
  Clone ID: LIB3180-061-P2-M1-H2
tgttggcttctcctcccccaccggttcgtagtcaggttctgattcgtgggcggtaggcaagagatggcggcgtctgacgttgagtaccgttgcttcgttgccggcctcccctgagccaccgaccaccactccctcaacatctccttcagcacctacggcgaggtcctcgagtcgaagatcatcctggatcgggagacgcagaggtcccgcggcttctgcttcttcaccttctccacggaggacgcgatgcgcagcgccatcgatggcatgaacggcaaggagctcgacggtcgcaacatcaccgttaactaggcccactccc

SEQ ID NO: 30397 - DNA, 401 bp, Zea mays
  unsure at all n locations
  Clone ID: LIB3180-061-P2-M1-H3
ttttacttacacaagtcgtcgtangcagcgatgttcggttctataccacgcatcggtccaaggaagagagagagatcgccgctccccttctcggcgtcggtggtgcgggtgccctccctcctcgagcgagatctgtctggtcacagatctatctgacaaaatggtgaagatctgctgcatcggtgctggctatgtcggtggcccaaccatggccgtcattgccctcaagtgcccagacattgaggtcgtcgtcgttgacatctccaagccccgcattgaggcctggaacagtgacaccctgccaatctacgagcctggtctcgatgatgttgtgaagcagtgcatgggcaggaaccttttcttcagcactgatgttgagaagcacgtcgctgaggctgaca

SEQ ID NO: 30398 - DNA, 163 bp, Zea mays
  Clone ID: LIB3180-061-P2-M1-H4
gaagcttccataagtttccatggggggttcctctcccggagggcgatccacaggggtcttctaccccgtccggcacttctcgcgctccctctttcgccccgtccaagggagggcttccttcatataatttttaaaatgcctggaaaagtctttggtcaaagtc

SEQ ID NO: 30399 - DNA, 407 bp, Zea mays
  Clone ID: LIB3180-061-P2-M1-H5
ttctattacaacagttacctttggtgcattgattggcacaaaacatcagggcacaacaactacaacaacttgtgctagcaaaccttgctgcctactctcagcaacagcagtttcttccattcaaccaactaggttcattgaactctgcttcttatttgcaacaacaacaactaccattcagccagctacctgctgcctacccccagcaatttcttccattcaaccaactagcagcattgaactctcctgcttatttacagcagcaacaactactaccattcagccagctagctggtgtgagccctgctaccttcttgacacaaccacagttgttgccgttctaccagcacgttgcgcctaacgctggcaccctcttacaactgcaacaattgctgccattcaaccaa

SEQ ID NO: 30400 - DNA, 370 bp, Zea mays
  Clone ID: LIB3180-061-P2-M1-H7
ttcttctcctgcttcgtctcttcactcgtgtggaagctatgatttagcccgcggcgcccatcctactttccttctcgtcatcgttctcatcttccccagccgccgccccgcctcagatggatccgtcgccggcgtggccgtcccggcggatccgccaggagatcttaaccttcttcgagtccaaggcacataccaggtggccgccgagtcccgtggtccccgtcaacaaccacacactgctgctcgccaacgctggaatgaaccagttcaagccggtcttactcggtacaatggcgccggactcgccgttagaacgtctgcaccgtgcctgtaacacccaaaagtgcaattcgtccggcgggaagcacaa

SEQ ID NO: 30401 - DNA, 399 bp, Zea mays
  Clone ID: LIB3180-061-P2-M1-H8
taacagagcaacgcccaggaacacacgacacgaatcatgcaaccaggtggcgagggaggaaccctagcggaacaggtgacggcggcgcgctaccggtgacgggggatacggcggcatcgtcctcctcggcccctcctccatccccggcgtggcggcgccagcagccggcctgcagaagattaaaggagccccaggagccccaactttcggaggacgacccagctgccttcaaagttcaaaatcaaaatgacggtggtgagggtggacgagaaccctgcgccggatggagagaactctcccctagacgatgagtacgtctcggccgacgatgaacacgttgatgatgaagacaaggagaccgatagcatcgacgactatgaaaaccccagcgggacgccc

SEQ ID NO: 30402 - DNA, 187 bp, Zea mays
  unsure at all n locations
  Clone ID: LIB3180-061-P2-M1-H9
tttcttcccacgtttcttttctcactcaacacagcacacccacgtcgagttttatagagagagatgtagagataaaaacctcnncgttccaccaccaccaccacaaccagccgtctcccccgacttcggtccctaaccagttgttcaacatttttttttccgccaacgagaactactacctggccgt

SEQ ID NO: 30403 - DNA, 391 bp, Zea mays
  unsure at all n locations
  Clone ID: LIB3180-062-P2-M1-A1
ggcaaaaggtgcaagtgaggcaaggcaggctgaacttcaccaccatggctcatattccagagggagcacccgtcatgactgactgtaacctcgctgacggagagtacgtcctcgtgccggagcaaggagctgctcaggaggtagccccggatccagcaccagagcctgcactagaggatctgcctaccacagctttggaaggttctttggaggacatggttgctggagtgacttggccgtccatcttgccatcgggttggactgtcgagtgggaaccccgcttcgctgaggaggagcatgaggagtgatgggacaagcttccccatctctttatttatttatcgntagttttattccactgcactcgaacaatgatgactacttttgcaaa

SEQ ID NO: 30404 - DNA, 302 bp, Zea mays
  Clone ID: LIB3180-062-P2-M1-A10
ggccagtagcccgcttgcagctgcggcgtcggtcgggaagaggccttgctccagtcccgcagatcgggggaggcgctcccccccgcccccgcctcgtcagctcggccgcttccccgccgccggtccctcccggaggcgccagcgtcgccgatgagctgcttcgtctgcttcgggtcggcggcgcacgacggggagtccaaggaagccccccgccgcgggcgccggcaaagacgtcccgccggatcgcgcggtggtccgcgtcggatcagacaaatcaagatcacagggtggaccagaatcta

SEQ ID NO: 30405 - DNA, 332 bp, Zea mays
  Clone ID: LIB3180-062-P2-M1-A11
gttttcctcactctctcctccagctcagggtccggcggcgaagggaaggcaagatgtacaccgcgaggaagaagatccagaaggagaagggtcttgagccctccgagttcgaggactccgttgcccaggctttctttgatctggagaacgggaaccaggagctcaagagcgacctcaaggacctgtacatcaacaatgctatccagatggatgttaccgggagtaggaaggctgttgtcattcacgtcccataccggcttgcgcaaggccttcaggaagatccatgtcagactcgtcagggagctggagaagaaattcagcggcaaggatgt

SEQ ID NO: 30406 - DNA, 325 bp, Zea mays
  Clone ID: LIB3180-062-P2-M1-A12
gtcttgcttgtggagagtgatgattcaaccaggcaggtcgtcagtgccctgcttcgttgctgcatgtaccaagttatctctgccgaaaatggccagcaagcatgggcttatcttgaagataagagaaacaacatagatcttgttttgactgaggtttttatgcccggtgtatctggtatttctctgctgagtagaatcatgagccacaatatttgcaagaacattccagtgattatgatgtcttcgagtgatgctatgagtacagtctttaaatgtttgtcaaaaggtgctgttgactttttagtcaagcctatacgtaagaatg

SEQ ID NO: 30407 - DNA, 309 bp, Zea mays
  Clone ID: LIB3180-062-P2-M1-A2
tcgcggacgcgtgggccgtcactcaacacagcacaggcagttcgagagagagagagagagagagagagataaagatgtcgtggttcgggcaccaccaccacaaccagccggctcccccggcgtcgggccccaaccaggtgttcaagatcttctgccgcgccaacgagaactactgcctggccgtccgcaacggcgccgtcgtgctggcccggtaaccccaaggacgaccaccagcactggtgcaaggacatgcgctctagcaccccggtcaaggacgaggaaggcatgccggcgttcgcgctcgtcaac

SEQ ID NO: 30408 - DNA, 378 bp, Zea mays
  Clone ID: LIB3180-062-P2-M1-A3
gtgctctgtccacctctctcgctctgggccgccgccgccgccctaagccacgtgctgaggctttcgttggtctcttcgccggcgacgagcacccagttctgtagaaatggctgatggtgaggacatccagcctcttgtctgcgacaatggcactggaatggtcaaggctggttttgctggcgatgatgcaccaagggcggttttccctagcattgttggccgtcctcgccacactggtgtcatggtagggatgggacagaaggacgcatatgttggcgatgaggcacagtccaagagaggtattcttacgctcaagtacccgattgagcacgggattgtgagcaactgggatgacatggagaaaatctggcattatac

SEQ ID NO: 30409 - DNA, 342 bp, Zea mays
  Clone ID: LIB3180-062-P2-M1-A4
tcggtacgcgtgggggagaaactccccggctcgaggagatcgtgacattgagaggacgatgggagggcgcgcgctcctcctcctcctggtctcggcgttggtctttcagatccacgcctccgacccgctgctgtacgagccgttcgatgaggactttgaggggagatgggtcgtctccaagaaggatgaataccaaggtgtgtggaagcatgccaagagtgatggtcatgaggactatggcctccttgttagtgagaaggcaaggaaatatgccattattcaaggagcttgatgagccagttaccttgaaggatgggacagtggtcctgcagtttgaagtga

SEQ ID NO: 30410 - DNA, 337 bp, Zea mays
  Clone ID: LIB3180-062-P2-M1-A5
ggttcgtgaggttctccggggttcggtttcgtgggtgagcggatcgagatggcggcgtcggatgttgagtaccgctgcttcgtcggcggcctcgcctgggccacggacgaccactccctccacaacgccttcagcacctacggcgaggtcctcgagtccaagatcatcctcgatcgggagacgcagaggtcccgcggcttcggcttcgtcaccttctccacggaggaggcgatgcggaacgccatcgagggcatgaacggcaaggagctggacggccgcaacatcaccgtcaacgaggcccagtcccgcggcggccgtggaggcggcggcggcggcg

SEQ ID NO: 30411 - DNA, 233 bp, Zea mays
  Clone ID: LIB3180-062-P2-M1-A7
tggctatacggtgcacgggaggcaacacagggggggcttttccaccgagggtgagagagcaaaagaagcacccatctcgactgtctgtcaccaccaccacagccagtccgctcccccggcgtatggccgcaaccacttgtgcaagatcttctgtcgcgccaacaagaactactctctgggctttcgctacgacaccttcgtgctggcccctgtcgaccccaaggactaccacc

SEQ ID NO: 30412 - DNA, 121 bp, Zea mays
  Clone ID: LIB3180-062-P2-M1-B12
gttgtcttcgaagttctttacctaattgcagaacctattcctgatttgggagtgtcaaatctctataatacctattgttatcttttattcaccatctatatacttatttccttttttattt

SEQ ID NO: 30413 - DNA, 398 bp, Zea mays
  Clone ID: LIB3180-062-P2-M1-B5
tgttcaaggaaatcaagttccttattggtgacatcgaatccagccagggtgccttccagtactttggcctgaaagaggaccagacaccccttatcctcatccaggatggtgactccaagaagttcttgaaggttcacgttgaggctgaccagatcgtctcttggttgaaggagtactttgacggcaaattgacctccgttcaggaagtctgagcctattcctgaggtcaacaatgagcctgttaaggtggttgttgctgacaacgtccacgacttcgtcttcaaatctggcaaaaatgtccttattgaattctatgccccctggtgcggacactgcaagaagctggcgcccatcttggacgaggcagccaccactctccataacgacgaggaagtcgt

SEQ ID NO: 30414 - DNA, 424 bp, Zea mays
  Clone ID: LIB3180-062-P2-M1-B6
ggagaatgcaagtgttaaagttgcattgaatcgcattgccgttgtttctgtcctggatgcacataccctgtcagtgatgtcttatgaagcttggaggctcatacatctgtttctgttggctctctctagctatatgcagtggagctgctaatatgcatgaagtttgggctaggtgagcttcctctttcacttgtcaaaccagtataggtattggccgatgtcaagaagacaaggccggcgacgagaggacgacagcgtgcaagaagagaaggcccatgttaggcgcaactatagggctcaaggtcaatcagttgtggtcacacttttccatttttacgttcagctaaactgaccccctgtctcatggtgcaactgtgcaaggataggcaacatgtgttcaacaatatgtctgtggatcaattga

SEQ ID NO: 30415 - DNA, 315 bp, Zea mays
  Clone ID: LIB3180-062-P2-M1-C1
cttcaagaaagaagaagcaaatagagcacacagtcgagtgtaaaccatccaaccaatcatggcttcgagttccaggagcaccgtgttttcacttctcctcctggtggcgctgctgctcagctgcagcggcatgagcagcgcgcgcggttgctggaagaggcgccgcccaaggaggagcacccacatcctgccgtgccggagctgccagaacctgagctgccgccgcaccctaccgacgtcgtgccgcctgagctgcccaaacccgagttgccaccgcacccggccgttgtccccgagctgccgaagcctgaggtg

SEQ ID NO: 30416 - DNA, 240 bp, Zea mays
  Clone ID: LIB3180-062-P2-M1-C10
gccgcgctgcgcggctcagcccggggccgggacatctcccttcgcagcaggatcgcatctgcaccgcatgtccggcgcgatcctaccgactagccgcgactgcctcccctccaacagccagacacaggatggagggggcaggcaaggattgcaacccgttgaggaattatcggattggcaagactctcggaattggctcattccgtaaggagaaaattgcggagcatatcatcactggac

SEQ ID NO: 30417 - DNA, 221 bp, Zea mays
  Clone ID: LIB3180-062-P2-M1-C11
tcacttcgtcaaccccaaccgtagtagtgctcaaggggagacggaggaggaggaggaagcggtataaagccgcggcgtcgttcgtcggcagccgcgtcctgagtcgctcgcagtctcagccgactccttttcctccttcttgtcttcttcctcgctgcagctctcgccgcctaggtcctggtctccttcttcattccaccttccttctctttttctcgttt

SEQ ID NO: 30418 - DNA, 256 bp, Zea mays
  Clone ID: LIB3180-062-P2-M1-C12
tcgctgcagtgcagcggcagctgtgtccaactaccaagtcaaggtgaccgttgggctgggtggcacgagacgcaacaaaacccttgtcagtcgcccgagccccaaggctcgcacccacgccagcggcaccgcacccccacccacctcggcggcgagtccgagccccaggaacgaagggcgatggcggcgatgatgatggccacgtccgagtcaaagtcccccgcccgcgcgctgaggcggctggctggcgccgcgg

SEQ ID NO: 30419 - DNA, 440 bp, Zea mays
  Clone ID: LIB3180-062-P2-M1-C2
tcttctttcgctacatgtacgtacatgtatcatcgcacgcgctacatccgacgttggtgatcgggtgggctccttgttctcgttgtgtcctgttcctgctgcgtatctttctttagcatttgaccttactcttgttgttttgctcgtcttgtatttatttcttttttttcctggttttttgttcgtgttgtgtgtatggtcaggttttcttgtatctttttgtttgtttttttttttttttttttatttttggtatatttttttttttttttttttctcttttttgtcttttttttttttttttttttttttggttttttttttttttttttctttttttgtattttttatattattattttatttttgtatttttttattttttttattttttttttttttattttgtattttttcttttttcttattttatttttttt

SEQ ID NO: 30420 - DNA, 213 bp, Zea mays
  Clone ID: LIB3180-062-P2-M1-C3
cactccagccctgcccagcgcaccaccaccaacacctggcaccgtcctccggcgtcgtcgtcactcgctcgaacgctcctccatccatggcgcccaagaacgctctccccgccgccagcggcatgacgctggagccgaggtaccgcggcgtccggaagcgcccctggggacggtacgcggcggagatccgggacccggccaggaaggcccttg

SEQ ID NO: 30421 - DNA, 307 bp, Zea mays
  Clone ID: LIB3180-062-P2-M1-C4
tctctcttcgcccctccgccgctaaagagccgccatccagccgcccagccccaggccgcaccgccccatctccacctcggtcccctcgcctcacctcgacccggattccgcccctcgcctcacctcgacctacatctgcctcgtccccatggaggcggcggcgagccgcaagcgcgcgtacagcatcatcgtgcctacctacaacgaacgcctcaacgtcgccctcatcgtctacctcatcttcaagcacctcccggatgtgaactttgagatcattattgtggatgatgggtagtccatatggaac

SEQ ID NO: 30422 - DNA, 355 bp, Zea mays
  Clone ID: LIB3180-062-P2-M1-C5
agcgcacacacacacaaccagatctcccgcaaatccacccgtcggcacctgcgcttcaagatgcagatctttgtgaaaaccctgaccggcaagactatcaccctcgaggtggagtcgtctgacaccattgacaacgttaaggccaagatccaggacaaggagggcatccccccagaccagcagcggctcatcttcgctggcaaacagcttgaggacgggcgcacgcttgctgactacaacatccagaaggagagcaccctccaccttgtgctccgcctcaggggaggcatgcatatctttgtgaaaaccctgaccggcaagactatcaccctcgaggtggagtcctctgacacca

SEQ ID NO: 30423 - DNA, 285 bp, Zea mays
  Clone ID: LIB3180-062-P2-M1-C6
tcgagatagttcgagcgcatgctcatgagcgccgaggagaagttcccaggcaaggtgcgcgccgtggtcaagttcaacgcggcgctggcgcaccacatcatggccggcgccgacgtgctcgccgtcaccagccgcttcgagccctgcggcctcatccagctgcaggggatgcgatacggaacgccctgcgcctgcgcgttcaccggtggactcgtctacaccatcatctaaggcaagaccgggttccacatgggccgtcttatcgtcgtctgtaacggtgggggg

SEQ ID NO: 30424 - DNA, 331 bp, Zea mays
  Clone ID: LIB3180-062-P2-M1-C7
taaatgatccttccttttctgccccatcttatactccccagacctaccgaaatgcaataattggtaagactggtctggctactacctctgcaagccttgcatatcagtcctattctctgggtcaagatactgctccttcacagcctctatcagcatatgcatcaagcgcagcagtcatgatgcctcctgctggaagatctgatcaatcatcagctaggcatggattcaagtctgggtctggtaagctagaagcacatgacagctggcagcagtggaaaggtgataataatgttgatattgcatctctggagggatcacacctcctattaac

SEQ ID NO: 30425 - DNA, 250 bp, Zea mays
  Clone ID: LIB3180-062-P2-M1-C8
ttagtggccaaagttcttcggagtccgaagccggctggtttgatctgggcaggaagcgttactggaaagttgtgagtgtgggggcagcactgtttttgtttcatcatcttgcttttataaacgctgttgtatattactctacatcgtttttactgtttttcatttattgtattattttttatttttcattttgtatttctgttatttatttttcttatattttttttgattctaggtttatttttttttt

SEQ ID NO: 30426 - DNA, 347 bp, Zea mays
  Clone ID: LIB3180-062-P2-M1-C9
ttcccttcctgtggatcaagtaagaggtgcaacaattgttgtctctggtgatggccgctatttctcaaaagatgctgttcagatcataacaaaaatggctgctgccaatggagtaagacgtgtttgggttggacaaaacagtctcatgtctactcctgctgtatctgctgtcatccgtgaaagagttggtgcagatggatcaaaggctactggtgccttcatcttgacagcgagccataacccaggtggtcctaaggaggacttcgggatcaaatacaacatgggaaatggtgggcctgctcctgaatctgttaccgacaagattttctctaatacaacgacaatct

SEQ ID NO: 30427 - DNA, 346 bp, Zea mays
  Clone ID: LIB3180-062-P2-M1-D1
ggcggctgcggcggagcacggaggcgaaggaggaggagcagcagcagcaggcggcgccgaggagcggcatcccactcagtgcttgcaaccatggctaggggattgaagaagcacttgaagaggctcaatgcgcccaagcattggatgctcgacaagcttggcggagcttttgctcccaagccatcttctggacctcacaagtccagggagtgccttcctctgatcctcatcatcaggaacaggctcaagtatgctctgaactaccgtgaggtcatttctatcctgatgcaacgccatgtacttgttgatgggcaggtcaggactgacaagaactaccctgctgggg

SEQ ID NO: 30428 - DNA, 312 bp, Zea mays
  Clone ID: LIB3180-062-P2-M1-D10
ataaaacccacgatgaagcatgtgacaatgttgtaacttctctctctattgatgctgaaaggaaattgggtgtttgcaactccatgaatgttcatgagaatatcagcttaaaagatccagaactttccaatgcagattattcccaaaagttcaataggtctgatgaaacttgtgatgtacataaagaggtttcttcaactgtgaatgatcctgatgaaagaaaatgcacagatgattcaacgaggtgcactaaaatgttcctgtgatctactgcatggcaaaattgtcaggtctcctgaagaacatgatttt

SEQ ID NO: 30429 - DNA, 320 bp, Zea mays
  Clone ID: LIB3180-062-P2-M1-D11
cccttcttcctctcctccccgtcatggcttccaccttctcccccacttccgccgcgagggccctcctcccgggctccacctcccgcccactcttcctcgccgcttcagcttcctcagggcgcattcaaccatccaggaagggactggacttccgccgcggccgattcaccgtctgcaatgtcgccgctcccaccgccgccgagcaggaggcgacggcgtcggcgtcggccgcgaaggagacccagcgccccgtgtacccgttcgcggtcatcgtggggcaggacgagatgaatctctgcctgctgctcaacggtatcgac

SEQ ID NO: 30430 - DNA, 260 bp, Zea mays
  Clone ID: LIB3180-062-P2-M1-D12
tcttcttcagatattcattaaagctttagcagatgtgcctgaacataggcgagtgacgcttatggtttacctcttaaggaccatgggaaaagaaaataatttgagtactgtgatcatgcatctgttacactcggtggttgagcggatttcacactcgttttctgtacatcatggggacgattattgattggctatgtcacaggagtgggagtatggattggttataaatgttctttaccagtttattgttaaatttgtta

SEQ ID NO: 30431 - DNA, 353 bp, Zea mays
  Clone ID: LIB3180-062-P2-M1-D2
gaccaaacctccattgtcccatcctcagcgtcttctccccgagcccagcagcgaccctcctcgatcccaaagaccagaaagattttgcctttcctcttatcttctcctcaaattcaattcctcgtaatctcccttattggcatcgattccttcgatcttctccgctaccccctcccgtttcccgctgcttattgagttttggactctgcatgagtctatcaactcgcccttgttaaaggattcattgtccaattgcggtagctcgcgcggcaagattcggtttttgagtcggggcgcgacggtagtggtccagattgctttgcccggctcgactttctggcctgagacctaat

SEQ ID NO: 30432 - DNA, 115 bp, Zea mays
  Clone ID: LIB3180-062-P2-M1-D3
cttcatgcctttttgttttttttgagataacaaggaggagaggaggagattgctgtcacgattcacacttgtttaagtgtctaggctaaatgtttattattagtacttttgtcta

SEQ ID NO: 30433 - DNA, 299 bp, Zea mays
  unsure at all n locations
  Clone ID: LIB3180-062-P2-M1-D4
tgnctcatcccatcccactaccacccatctcgtcgtccgccgattcgatccggtgtgcttccaacccagggtgagtctccggatccgtcgccgactggtatccgagtgctatcgtaaacgatccagaactttccgtntgactgtccccctcgccttccgcggcgtctgatgaaacttgcgaggtacataaagaggtttcttcaactgtgaatgatcctgatgaaagannnnccncttcacattcaacgaggtgcacctaaaagtttcctggatctactgcatggcaaaattgtcagttc

SEQ ID NO: 30434 - DNA, 362 bp, Zea mays
  Clone ID: LIB3180-062-P2-M1-D5
tctaagcacgtgggtactatgatgataagtactggagtcaagtacaagcttttgaaggtttaccgtttgttattcaaacagaggaagaaagaatgtaccaagagaaagtaaatgaaattgacaataaaatggaatccgtgagtggtctcatgaagcattggcttacttttatgtcaaaaaagtatctagaagatttaaccccagagatgagagaacctttacaaaatgaaggtggtgatagttatgaccaatgcactgaagatgacaactctgaaaattatgctgccaaagatacgagtagcatccaagaagattcaaatgctgacgtgaacttttcaaccaaatgaagtgcataacatggt

SEQ ID NO: 30435 - DNA, 267 bp, Zea mays
  Clone ID: LIB3180-062-P2-M1-D7
tctttctctagccctcgcgccgccgccgccgggcccagctctcgagctcctggggtggcgctagctctcgccgcaactccaccatgaagttcaacatcgcgaacccgtctaccgggtgccagaagaagctggaaatcgatgactaccataaactacgtgccttttatgaccgaaggatctctcaggaggtcagtggtgattgctctgggtgaggagttttaagggttatgtcttcaatatcatgggtggatgttacaaacaatgctt

SEQ ID NO: 30436 - DNA, 378 bp, Zea mays
  Clone ID: LIB3180-062-P2-M1-D8
tagcaacatagaaagcacaatagtgtaccaacaatggcagccaaaatattttgcctccttatgctccttggtctttctgcaagtgctgctacggcgaccattttcccgcaatgctcgcaagctcctatagcttcccttcttcccccgtacctctcaccagcggtgtcttcggtatgtgaaaacccaattcttcaaccctacaggatccaacaggcaatcgcagctggcatcttacctttatcacccttgttcctccaacaatcatcagccctattacaacagttacctttggtgcatttattggcacaaaacatcatggcacaacaactacaacaacttgtgctagcataccttgctgcctactctcagcaacagcag

SEQ ID NO: 30437 - DNA, 336 bp, Zea mays
  Clone ID: LIB3180-062-P2-M1-D9
tcgatgaaggagatgtttgacagggcagctcatcttggtgtaaagaggatggggattgggattccacacaaaggccggttaaatgtcttgggaaatggtgggaggaaacccttgcgacaaatatttaacgagttcaatggtggcaccaaacccttcaattaaagccaagggtttttttccggggcttgtgatttcaaattccaattttgaaccttattttatatggccaccaaggttgggtaacatattcatttgttactgattgcaaacccgtgttatttggtaacattatattcccatattgtttgagaaaacaagtatcgtattcattttcct

SEQ ID NO: 30438 - DNA, 301 bp, Zea mays
  Clone ID: LIB3180-062-P2-M1-E1
gttggttcttgtaaacaacatgaattgattattcctgagcctaagaaaatggaatccatcatcagttacaatgaaatagatcaatctattgttggttctcacaaacaagacaaatctgttgttagtgtgcctgagcaaatccaatccattgttagtcacagcaaaccaaatcaatctactgttgattcttattgacaagctgaatcaattattggtgtgcctgagaaaggccaatccattaccagtttcgattaactatgaccaggccattggtgggttttttaaacaagatgagcctttt

SEQ ID NO: 30439 - DNA, 94 bp, Zea mays
  unsure at all n locations
  Clone ID: LIB3180-062-P2-M1-E10
atcttcttctcgtccgtcccgcttctctctctcctgaggcgcagcggtggggtggggtggngtanttagcggttttgcgagctttcaccttctg

SEQ ID NO: 30440 - DNA, 386 bp, Zea mays
  Clone ID: LIB3180-062-P2-M1-E11
gcagctgccacagagacatcagagagcggtcctccttgtgagtctgagctgaagaggaggaggaggaggaggagaagcagcagcgcagccggaggagggagagcgaagatgcgccgcgtcgcgctgttgctcgtcgccgccgtgtgcgcgctggcggcgccggctgccgcggtcgtcactgacggtcttctcccgaacggcaacttcgaggatggcccgcccaagtcggcgctggtgaacggcacggtggtgtcgggcgcccacgccatcccgcggtgggagacgtccggcttcgtggagtacatcgagtcggggcacacgcagggggacatgctgctggtggtgccgcagggcgcgcacgcggtgcggctgggcaacgaggcgtc

SEQ ID NO: 30441 - DNA, 191 bp, Zea mays
  Clone ID: LIB3180-062-P2-M1-E12
cgcgcgcgcccctctcgggtctcggccgcgccgtcgcgctcaccaggtctgcaccatcaccagagtggcggcgctctctcctatcgcggcgagcgacggcggcgatgggaggaggggagatggcggtgtgtctacttgctctggctttcatgcgcatgggtagtttcgtcagtccatcttgctttggttac

SEQ ID NO: 30442 - DNA, 380 bp, Zea mays
  Clone ID: LIB3180-062-P2-M1-E2
tcgatcctgactactgaggctccgaatcgatctgggttccccaccaaaccggagcactttagaggccgtacccggcgagaagcgaccgaccgtagccagctcacgtcttcctcttcatgcaccatgctgagggtcgcgggcaggcgcctctcgtacggtctcgcctggcgccccgtcgccggcgcctcaggcttcaggggccctgtcgccgggacactacccggacgcgacgacgacgacacacgcgactgcagggcgcgtttcgccatcgaatctcccttcttcgccgttgccagagggttttctgcaaagactcttgcttcaagaaaccaggatgtgggcttatgccagctcccagcaactggggcaactgggaaaaa

SEQ ID NO: 30443 - DNA, 281 bp, Zea mays
  Clone ID: LIB3180-062-P2-M1-E3
tcttcttgctccagagtatgagaatgcggccagaggcacttatcaagcatgaccgagcgattgttctcgctaaggttgatgctaaccaggataatatcatgctccttgctaccaattactatatccaaggtttcccatctcattaaaatctttaggcaccttttcaaatacttttactttatcattgactatatttattcttattatttagaattatacttttcataaacttaattaccactatcttacttcatttttatatacttatcttaattatattt

SEQ ID NO: 30444 - DNA, 375 bp, Zea mays
  Clone ID: LIB3180-062-P2-M1-E4
tcgtttaggctgccgcatacaaaatgttcgagacgatcaacagaacgccagagatggacgcgtacagcaccacggggaggaagctggaggacgttcgaggggacatcgagttcagggatgtctatttctcctacccgacaaggcccaacgaacagatattcaagggtttctccctcgccatacctagtggcacgacgatcgcgttggtaggccagagcgggagcggtaaatccacggtcatcagcctgatcgaacggttttatgaccctcagcttggcgatgttctgatagatggtgtgaatctcaaggagtttcagttgaggtggatcagaagtaaaatcggtcttgtcagccaggagccggtcctttttgctg

SEQ ID NO: 30445 - DNA, 389 bp, Zea mays
  Clone ID: LIB3180-062-P2-M1-E5
ccatgatggtgtgagaatgggttctttgggtctaatgctcaactctgtcgtgcttggattcacctctgttgtgctagaaaagttatgtaggaagtggggagctggacttgtatggggtgtctccaatattctaatgactttgtgcttcttggcaatgcttgtaataacatatgttgcaaagaacatggattatccatccagtggtgcacctgcgactggcattgtcgttgcttctttggagggcacacaagtttaggggcacccctggcgatcacatgcagtataccatatgcaatggctgttagtcgtgttgaaaatctcagtcttggccaaggcctagctatggctattctcactctaagctattgccactccacaattttattgtg

SEQ ID NO: 30446 - DNA, 78 bp, Zea mays
  unsure at all n locations
  Clone ID: LIB3180-062-P2-M1-E7
tttcaagcccgagggccggtcgtctccatggggggtatcctaacgtggggggggtcccttcttttcntcttttttttt

SEQ ID NO: 30447 - DNA, 208 bp, Zea mays
  Clone ID: LIB3180-062-P2-M1-E8
tggatgacagccatggtcgccgcgaagctggttcgggagctcactgggaagatctccaagtgaaacggtcaggattgcaccactcttcttgaagcaaagcgaaagggtgggttttgatgtcccggtggttattgttcatggtttttatatatcgagctccaaatttgtttttattgtttcattattattatgttttatttttttttat

SEQ ID NO: 30448 - DNA, 332 bp, Zea mays
  Clone ID: LIB3180-062-P2-M1-E9
ttcacaagttcacactccacagcacgttcaccactgagtagcagctaccgccatgttgatcgccaccaccaccatgccacgaggtttcgctttcgcggcgccatgccgcagcctccagacgacgacagtcaggtgcaaggctaccggcggcgccgaccgccgcgacgtgctcctcagcctcggcggggcggcggcggccggcctcctcaggtcgtcgtcctcgttgagcagcggcggggcgcccatccaggcgccggacctccggaactgccacccgtccgaccttcccgacacggcggaggacgtcaactgctgcccgagcccggggatcg

SEQ ID NO: 30449 - DNA, 222 bp, Zea mays
  Clone ID: LIB3180-062-P2-M1-F1
cgaggagttgatgattgcgtacaaggaccaccaggtccttgaccccttaattccgcaagcaaaaaagaagatccacccccaccacctcttatattaaatggcctggtgtgtaaatataaatataaccaaattcctttgggtaagctatatatatgggtgggatataataaatgacacgcgctatagtgtgtcgtgtatatagccccaataaaaaaaattata

SEQ ID NO: 30450 - DNA, 431 bp, Zea mays
  Clone ID: LIB3180-062-P2-M1-F10
ctaatatatggtgcatttattcattctagtcaccttgagaacaatcagttaactggtgaattgccatcttctttgggtgacctacctaacctgaaagagttgtatgttcaaaataacaagctgtctgggcaggttccaaaagcacttttcaagagaagcattattttgaacttctcaggcaacagtggccttcacatagtaagcaatggcattagccacaccataattattatatgtgtggtgattggagccgttgtcttactgggtgttgctattgggtgctatttcattacatgtaggagaaagaataaatctcatgaagacactgttgtcattgcagcagcaccagctaaaaaacttggttcatattttagtgaagtggctacagaatcagcacacagattttctttatctgaaattgaaaatgctac

SEQ ID NO: 30451 - DNA, 384 bp, Zea mays
  Clone ID: LIB3180-062-P2-M1-F11
gccacaactactacaatgagaaaacttggacttatttgggtgacgaaccgaatgcacattgagatctacaagtacccagcttggggtgatgttgttgagatcgaaacatggtgccaagaagatggaaaaattggtactcgtcgtgattggatcctcaaggacctgtctactggtgaagttactggcagagctaccatcatgtgggtcatgatgaaccaaaatacacggagacttcagcgagtcattgatgacgtgagggatgaggtgtttatacattgtctaattacttctagaattttattttacagaataaattttttttctgatttttagattaattttaaatgtgtctttattgttgtaaatatttttacttgtttttgt

SEQ ID NO: 30452 - DNA, 375 bp, Zea mays
  unsure at all n locations
  Clone ID: LIB3180-062-P2-M1-F12
gacgcaagggagagtgacggaaagcgacgcggcgcgagcgaggagggccaaggcgaataggggaagcaccgcaccaggacccttgttcgccgccgccgcctctgatctccgcgaggttgtcaggattcaatatgtcgaccagcacattcgctacttcctgcacgctgttgggcaatgttagaacaacgcaagccttccagacagcggtgaagagcccttcgtctctaagcttcttcagccaagttacgaaggttccaagcctgaagaccttcaagaaacttggatgtctncgncatggctgtatacaaagtgaagcttgtcgggccttgaaggtgtagagcacgagtttgatgcttcagacgactcctacattct

SEQ ID NO: 30453 - DNA, 229 bp, Zea mays
  Clone ID: LIB3180-062-P2-M1-F3
ctctactgcgaagctccccccagttcccacggtttcccccacgacgccggggatgggcaagcggaaacagcgcggcagcggctacggataacccgccgcggaaggcggtgctggcggaggacacagcccctccaccgtgttcgtttccaacctcccctacaccttcaagtccttcgatctcgaggcggtgtttagcgaggtcggcccacttcggcgctgctttatggtc

SEQ ID NO: 30454 - DNA, 192 bp, Zea mays
  Clone ID: LIB3180-062-P2-M1-F4
tttactggtatatcggtcatacctaccgagtgcccttttctaaaatacgtacgagcggacgtgtacgaatcaaaaaagcttgctattcccggcgtagactcagctctgggaggctactatcaactaaccctgtgggaggattctgatactcgcgattcggtcgttatatctcaagtgtctgtacgcgcatct

SEQ ID NO: 30455 - DNA, 339 bp, Zea mays
  Clone ID: LIB3180-062-P2-M1-F5
tcgggaccaggtaagcagcagcaggaaccctagcaccgccgcatccgcagccatgggtatcgacctcgttgccggtgggaggaacaagaagaccaagcgcacagcgccgaagtccgacgatgtttatctcaagctccttgtcaagctctaccgtttcttggtcaggaggaccaagagcaacttcaatgctgtcattctcaagaggctcttcatgagcaaaaccaatcgcccaccaatctccatgcgccgccttgtcaagttcatggaaggaaaggagaagaacattgctgtgattgttggcacagtcacagatgacaagaggatccaagaggttccagc

SEQ ID NO: 30456 - DNA, 143 bp, Zea mays
  Clone ID: LIB3180-062-P2-M1-F7
tctctgcgaaggagatggatcgtctgcccgagtcgtcccggagcatgaggaagtgcgcgtcttttgccttctttctgttctcgtttttttttttttttttacttttcttcttttttttttttttttttattctcctttttttt

SEQ ID NO: 30457 - DNA, 244 bp, Zea mays
  Clone ID: LIB3180-062-P2-M1-F8
ccgcaggcgcactacccgcccatggtgcgcctgtcccggcgcctctgggacgaggcccatgccgactccgggtacaccgtgctcacgcccaccccgcacctcgacctgggcccgcgggacgactcggcgctcgtcgcctccatgaggaacggcggtgccaccgaagtcgtcgccggggatgagtcgtcgtcctggccgtgggcaggcgtgttcagggtccccgacgggtggacggcggcgcgga

SEQ ID NO: 30458 - DNA, 341 bp, Zea mays
  Clone ID: LIB3180-062-P2-M1-F9
gcagatggtactctcatctgttactcaccgcagcataaacctggtcgagtacctttttatatcacctgctccaacaggttggcctgcagtgaagtgcgagagtttgaatttcgaccaactgtctcccagtacatggatgctcctagtccacatggtgaaacaaacaaagtttatttccagatacgccttgacaagttgttatcccttggaccggatgagtaccaggcaactgtatctaatcctactctggagatggttgacttaagcaggaagataagttcactgatggcgagcaacgatgagtggtccaacttgcttaagttggctgttgataatgagcc

SEQ ID NO: 30459 - DNA, 273 bp, Zea mays
  Clone ID: LIB3180-062-P2-M1-G1
ggtacagatgctggagtcggatgtaattacaccgtgccctagcgacttctatgattcagagtagtctcctggacaagccacgctgctgctagtttcccgtgggggcgcattcctttattctttgcgtatattgtgtaaatgcattgccgcggtgtttggtctccaatcggctggctcaacgggtgacatttttttgcgtctgtatacctatgtatgtatctgtcatgctacaagttggctatatgctgatttaataagagagaacttactagt

SEQ ID NO: 30460 - DNA, 397 bp, Zea mays
  Clone ID: LIB3180-062-P2-M1-G11
cgagcgagcacaaaaaaaaaaatcccaatatccgcaacggcaatgtctccgctgccccgcatcgtgctcctcgccgtcgccgccgccgccgccgcagcggtcacggcgtcagccacgtcgctcagcggcgcggcgaacgacctactccccaagtacggcctcccgaaggggctcatcccggactccgtcgcctcctacagcttcgacgaggccacgggcgccttcgagatccacctcgccggcacctgctacgtccacttcggctcccacctcgtctactacgagaggaccataaccggcaagctctccaagggcgccatctcggacctttccggcgtccaggccaagaagctcttcctctgggtctacgtcacggggatggttcggcaccctgacc

SEQ ID NO: 30461 - DNA, 345 bp, Zea mays
  Clone ID: LIB3180-062-P2-M1-G12
cagactatctcacccgactcgtcagacgtcagccagcagttcgaaaccaaggatcgatccaggagcttccggaaggcgaggcgcgcgcgcagcgtcgaggtgctggtgccggtgccgcccatggatcgggctcgcggatccgcgttcctgctcggcgtcctgctcgcaggatccttgttcgcgttttcagttgctaaagaggagaccaagaagctcgggaccgtgatcggtatcgatctcggtaccacctactcctgtgtcggtgtctacaagaacggtcatgtcgagatcatcgccaatgaccagggtatccgtttcacaaccctatgggttgccttcaccgat

SEQ ID NO: 30462 - DNA, 256 bp, Zea mays
  Clone ID: LIB3180-062-P2-M1-G2
gctggcgcagcgcaggcagcatccacagcctgaatccaccacaccagcaccacccagcaccgatggccggcgacgacggacgtgctccctccggcctccgcgtcgtgatgttccccttcccgttctggagccacattaaccagatgctccagctcgggaagctcctccgtgcgcgcggcctgggcgtcaccatgctccacaccgtcttcaacgcgcccgaccccgcactccacccgggcattaccttcgggtccat

SEQ ID NO: 30463 - DNA, 390 bp, Zea mays
  Clone ID: LIB3180-062-P2-M1-G3
catcactgcactggtggcgcccgtggtgctccacagagtgaagcgatagccaggagaggcgacgatgcgcaagtgggcgctctcctccgcgctcctcctcctctttctcctcaccacactccccgacccagctaagaagctacaagtgaatgccgaggagagcagcgatgacttggctaacccaccgaaggtagaggagaagtttggtgctgtccctcatggcctgtccacccgactctgaggttgcccagagggaagccgagtctatctctaggaagactctcaggagctcagccgagaagtttgagttccaagctgaggtttccagactcatggacatcatcttcaactcactctacagcaacaaggatatctttctgagggagctca

SEQ ID NO: 30464 - DNA, 382 bp, Zea mays
  unsure at all n locations
  Clone ID: LIB3180-062-P2-M1-G4
gacgcggcctgttgtcccggcttttagacgcagcttccatcgctgcgaagctatgcattcgtgttcgtcatggccgccagcgtcaccgtggaaaacctcaaccccaaggtcttaaaatgtgagtatgcagtccgtggggagattgtcatccatgctcagcgcctgcagcaacaactacaaacacaaccagggtctcttccttttgatgagatcctctattgcaatattgggaatccccaatctcttggtcagcaacctgtgacattcttcagagaggttcttgctctttgtgatcatccgtgccttttggaaaaagaggnaaccccgtcctagattttcttttcatctaaaggtgggcgatgttgaaggcagaaccggccct

SEQ ID NO: 30465 - DNA, 171 bp, Zea mays
  Clone ID: LIB3180-062-P2-M1-G7
cccactctctctctcccccgattcctttcctcgtcctcgtcctcatccgggcaggggagcaaacaagcaagcaagtaaacgggcgaggagctggatagaggccggcgactcgaagcaaccgccgatcggagccgcggctgaggaggaggagcaagctcgagatggtgggtc

SEQ ID NO: 30466 - DNA, 364 bp, Zea mays
  Clone ID: LIB3180-062-P2-M1-G8
tcagaatcggatcaaagagcaagcgacggggatgagagagaagagaggaccgtcgtctccccttcctccctcacaagtcacaactcacacgccagacggagacgcggccgcagccgagcttacccccgccggcgagttcacccccacatggtcggccggatggagcggcagaccgcgtcgtcgccagcttcgtgctcctcctcctcctcctcctcctcttcctcctcggtctgcggcggcaagaaagcgccctgatatcctcaacatgatccggaatgcagcctgtcttaattcgtcatctactgataccggcaagggaaggagtaaattgtcaaccaacaaagttacacatggattccacctg

SEQ ID NO: 30467 - DNA, 210 bp, Zea mays
  unsure at all n locations
  Clone ID: LIB3180-062-P2-M1-G9
tctgcgtacacggtctccctcttcctgtcagtagtagagtgagagtgaggcagcgagtgggagacaaggggaaatggggaagggagcgcaagggagcgatgcggnggcagcatgcggctaggtttatgatacaatttatcttatatatttccatgttttctttattatcgtttttctcttgttttctctcttttatttatatgtaatata

SEQ ID NO: 30468 - DNA, 384 bp, Zea mays
  unsure at all n locations
  Clone ID: LIB3180-062-P2-M1-H1
gtcaggatgtccaagcgcgccggatggggagtgatggcaagccacaggagtggcgagacagaggacaccttcattgctgacctctcagttggcctgtctacgggccaaatcaagacgggagctccttgccggtctgagcgcctggccaaatacaaccagctgctcaggatcgaggaagagctcggtgatgccgcggtctacgccggagcaaagttaagggcaccagtggagccctactaagaaaggaagaggattggagtgttttcttgtggagctatactagctcgctgctgccttttgttacaatgtttgtacggtcgcaataaatgtatggtcgtgtttgctcgagagctactcangtgattttgtcgtgggagcaccaaa

SEQ ID NO: 30469 - DNA, 329 bp, Zea mays
  Clone ID: LIB3180-062-P2-M1-H11
cggctagggttttgctgcctcccgagccgaaaccctagagcacccgcgcgcatcccatggcgtgctaggcttcgattgagactggggggattagtaccgcaggctgggattagagcaagcgccgagcggaaatggcatcgagtaaccaattcgatctacttggagacgtcgagaacgacgaccctgcccacctcctcgcagctgccgagaagaaggcggccgcggtgcctaagcccgcgcccgctccggacaagttgtccaccaagcctccggcgtccgcgcaacctgtgagggaggaaaggaactttggtgctacaccgtgcgatggt

SEQ ID NO: 30470 - DNA, 371 bp, Zea mays
  unsure at all n locations
  Clone ID: LIB3180-062-P2-M1-H12
tcatcctcctccacttctccatggcttcttttctttctctcgctcgcatgtgacatttgtgtctacccacctgtcgcctccatgcatgctcgtccatatctctagttctctacacctctaaaccaaaaatcacaagaactatctccctcagctcctccatgctccggcaattctccattcctcatatatgcacctagcaacacctcgatccatgtcgtgtcgtcgtcgctgctgcatgcctacccccctttttttgattcgttgctgtgttaattatagtggtcgcctctttagatgttacagtaaaaaaatatttgcggtgntgcggctatttattgatttggtctggtaattaataagaaccctcaagc

SEQ ID NO: 30471 - DNA, 402 bp, Zea mays
  unsure at all n locations
  Clone ID: LIB3180-062-P2-M1-H2
ctgaaagaactgcgagtggcactgtgaatacttcacaggcggatcggttgacccaaacaaaattgcagaatggcaggtccagcagcttgtgccttcaaaacaattccgatggcattcaatggcccagagaccacgaaggaggactggaaggctctttgaggccttgctctcgcaatacaagctccgagggtgatgagcaacaaaagcggcctggtgatgtcaagttgtttggacagattctcagccatcagtcaaccctgcagagttctggcttgtcttgcaatggtaacaagagcaagcctccctcaccaaagatcgacacatctgtgagatccatgaacaatccaatggaccgtgtgggttgttttncaggcctggcaccactccacaatctggtctgga

SEQ ID NO: 30472 - DNA, 160 bp, Zea mays
  Clone ID: LIB3180-062-P2-M1-H3
gccccattccgtccgcgcgcccgcgctcgcggcctcgctcaatccgccagcgctacccgcctacccccccggtggtagcgggctctacggcagcgctcctctccagttcccctgcgctccgcgtcttcatctgtggccgccgacgcttcgtcggtgtctc

SEQ ID NO: 30473 - DNA, 423 bp, Zea mays
  unsure at all n locations
  Clone ID: LIB3180-062-P2-M1-H5
ggtgatctagcaatacttgaagatgaacaaccgtatttccattctagtgatgctcatcgtcgatgtgtctgttgtcctcctgctcaattcccatgtagggttatgcagctgctacaaccgcatctttagttttggtgacgataccatggacactggaaatttcattcacttgattgggaaggccccatctaagtacaaggaagccccctatggcaagacattttttagacatgcaactggccgcatttctgatggtcgtgtcctcattgatttctatgcggaagcactaaaactgccaatgataccacccattttacctgagaagaactctgggtgtttcccacatggcgccaactttcctgtgtttggtgccacggnacgtggcaaagttttttttttagggagccccttgtgtataggcac

SEQ ID NO: 30474 - DNA, 77 bp, Zea mays
  unsure at all n locations
  Clone ID: LIB3180-062-P2-M1-H6
tctcctatattcatgtcnacttctccatnnnttggggtctttctctcactcgcatggaacatttgtntttacccacc

SEQ ID NO: 30475 - DNA, 252 bp, Zea mays
  Clone ID: LIB3180-062-P2-M1-H8
agccttctggccgcggccggaattggccgcttgcgaggacaactttgcccggtaaacgcgttccgcttaccttgaccctttttactgggacccccggtttgggaaggaagagccctacagtgggtcaagggcttttcgcactttcgccacctcttctcgcgccttttctctccccgcccctttggggcctctagaggtggggcgcggaaactcgggttggggagagtctcctgcgggagggggcgtcccgcg

SEQ ID NO: 30476 - DNA, 311 bp, Zea mays
  Clone ID: LIB3180-062-P2-M1-H9
tcaactagcaacatagaaagcacaatagtgtaccaacaatggcagctaaaatattttgcctccttatgctccttggtctttctgcaagtgctgctacggcgaccattttcccacaatgctcacaagctcctatagcttcccttcttcccccgtacctctcaccaacggtgtcttcggtatgtgaaaacccaattcttcaaccctacaggatccaacaggcaatcgcaagctggcatcttacctttatcacccttggttcctccaacaatcatcaacccctattacagcaggttccctttggtgcatttatt

SEQ ID NO: 30477 - DNA, 497 bp, Zea mays
  unsure at all n locations
  Clone ID: LIB3180-003-G12-R1A
attctccctatantcattcctattacaattcactgtccttcattttacaacttcattactttttaaaaccctatacattacccaacttaatctcctttcancacatccccctttctccatctttcataatatctaatattccctcacctatcacccttcccaacatttactcatccttaatctctaatttacttctcctaatatcatcacatttaagctctttcattataattgtgtattactcaacattttacctgcttacactttaccatctccctatcccctcacctttctctttcttcccttcctttctcaccactatcaccttctttccccttcaaactctaaatcattgtctcctttatatttcctatttaattctttatgtcacatcaacaccaaaaaactttaatagacatcatatttcacatattttctcatcaccctttatatacttttttttctacctttttaatttaacaatccacatttcttta

SEQ ID NO: 30478 - DNA, 649 bp, Zea mays
  unsure at all n locations
  Clone ID: LIB3180-013-D2-R1A
tagcaacatacatagtgaagtacactagcaacatcttagcaccaatgggagccaagatttttgccctccttgccctccttgctctttcagcaagcgctgctacctcgacttttattccacaatgctcacaacaatacctctctccggcgacagcgtgggatttcaatacccaactatacaatcctacatggtacaagaggccatccaagcaagcatcttacggtcattagcattaaccctccaacaaccatatgctctattgcaacagccatccttagtgcatctgtatctccaaagaatcgcggcacaacaactacaacaacagttgctaccaacaatcaatcaagtagttgcagcgaaccttgctgcttacctccagcaacaacagtttcttccattcaatgcactagatggggtgaacctgctatctacttgcaggcacaacagctactaccatttaaaccacttgtcgggagcccttatgccttcttactgcaacaacagcttctaccattccatctgncagctgtgggcaacattgctgctttctttgagacacaacatttggttgcattttacccacaggttgtggggaaacattaatgccttctttgcaacagcacaattgcgtacattctacccacagaat

SEQ ID NO: 30479 - DNA, 563 bp, Zea mays
  Clone ID: LIB3180-030-G3-R1A
ggcttgggtcggattggtttcggaaagtttggtctccagtgacccgagcactggagatgccctgtttggagcaaattccgatggcgaccggcgagaccgccgtggatcgtcgcgaggaccaccgcgacatggatttgtcaggggaggagcacgtgcggcccaaggcgcggaagccgtacacgatcacgaagcggcgggagaggtggacggaggacgagcacggtcagttcctcgaggccctgcagctgcacggtcgcgcctggcgccgcatacaagtgcacatcggcaccaagactgccgtgcaaatccggagccacgcgcagaagttcttcaccaaggtggtccgagaatcgtcgccaggaagcaacgcctccgcgggcgccgcgccggcgatccagatccccccgccgcgccccaagaggaagccggcgcacccttacccgcgcaaagcggacggcgcggccaagaagcccgcgccggagctcaagcggctggagaagacgtccctgcgcgaccgggttccggacgaagagtcgccgacgtcggtgcttgcctcggcgcgc

SEQ ID NO: 30480 - DNA, 342 bp, Zea mays
  Clone ID: LIB3180-047-G3-R1A
cgatctcgattcaaatccatccatcctcgcatccaccgacccgcagcatctcaaccccatggccaagatcaagatcgggatcaatgggctcggcatgatccgaaagctggcatccagagtggccctgcagagtgacgatgacgagctcgtcgccgtataacgagcccatcatcagcagcgactacatgacctacatgctcacgtacggcactgtgcacggacagtggtaccaccatgaagtcactgtgaaagactccaaaacccttcacattggtgagcaggaagctgctatgtttggctacaagaatcctgaggcgattccgtagggttccatcggcgctg

SEQ ID NO: 30481 - DNA, 577 bp, Zea mays
  Clone ID: LIB3180-055-A2-R1A
cgagatcgaccaaagcgtcgacgcctcctcgatggccatctcggcctccatggagaatgctgcgggcgcggtggcgggggcaagtggcgccggcggtggcagcgggagaggcaagaagaaagggatgccggccaagaacctcatggcggacgccggcgtcgcaagaagctcaatgaccgcctctacatgctgcgctcggtggtgccgaagatcagcaagatggatagggcttctatccttggcgacgcaattgagtatctgaaggagctcctgcagaggatcagcgatcttcacaatgaacttgagtcagctccgagctcttcgcttgttggaccaacatcagctagcttcaacccatcaacaccgacattgcagacatttcctggccaggtcaaggaagaactttgcccgggctcattcccaagccctactggacaacaagccacagtcgaagtcaggatgagggaagggcatgcagtcagatatccacatgttctgtgcacgtaggccaggcatcctggctgtcgaccatgacggccctcgacagcctaggccttcaaatcgaacaggcgtcatc

SEQ ID NO: 30482 - DNA, 499 bp, Zea mays
  Clone ID: LIB3180-003-G12-F1A
gccttttaatttttgttgttgcaagttaaaacacgggtacttaaacttagcaccactaaaattatccgatgttgcaaagcacttgaaacataaatgtcaataacaaggaatactagccaaaaaatactcatccaacaaaactgtagaacgatggaaaattctgtccaacctatcatgacaatatattaagtgcaatcagaaattcactgaattttaagaaccactactcaaaagacacggtacgatttccccatggtaatcttcagatataggcagcgaacgttctgccaattctttttcagcaaagagacaagggagttaacactcagttgtacattttgggaggtttgcttttccaccatgctaacattccccacagctactcccatgcagagaaccttcttaagctggaacttgaccatggccttggactcattaacctttgactcgagagattcttggtgagtcacaagtggagggaacttccctgccttgttga

SEQ ID NO: 30483 - DNA, 459 bp, Zea mays
  Clone ID: LIB3180-013-D2-F1A
aaaatatagatctctaatactttattactgagaggtcgcacatatcagcatgagaactttattattacagtataaatcataaaaaatctagaagatggcaccaccaatggtgggcggttgcaataaggtggtaggattcgtcaaagcatgttggctaaatggcaacaattgttgttgttgtaagaaggcaacaatgtttgccacattctgtgggtagaatggtagcaattgttgctgttgcaagaaggcattaatgtttcccacaacctgtgggtaaaatggcaacaaatgttgttgtctcaagaaagcagcaatgtttgccacagcttgcagatggaatggtagaagctgttgttgcagtaagaaggcataagggctcccgacaagttggttaaatggtagtagctgttgtgcctgcaagtagatagcagggttcaccccatctagttgattgaatgg

SEQ ID NO: 30484 - DNA, 76 bp, Zea mays
  Clone ID: LIB3180-017-D8-F1A
gcttaaaccgcatccaccaaggatcattaatgacgattcctttgtatgcaagggtaaactccagcattcaaataca

SEQ ID NO: 30485 - DNA, 361 bp, Zea mays
  Clone ID: LIB3180-030-G3-F1A
atggggagggtttttttttttttgcgaacgtgcagaagagattataaaggttttaacgaatcaggtataagtctgtcccaataacaaatccgacattttacaacttttttcccccggatggcaaaaaagttggcttctgcaaaaaaaaaaaaaaaaaaaaaattgtgcaggggaacgctttgtcaaaaaaacttttagaggggggtcccagtgtcgtgcccgtcccacccgaaaaagctcttgccacctgtttcagcagagagcatgtgcattgcagccttcagctcttgtcaaaagcaaagcctcgtaaggtcgccgtggggctcctctcggggggccagggccagtgccaacgggcggg

SEQ ID NO: 30486 - DNA, 428 bp, Zea mays
  Clone ID: LIB3180-037-E3-F1A
gaaagaagaaaaaacatggagatgcatcattgtttagatatcacccaagctttctgccttatgggttcaatcagatatgtaataaacttatacagacatcgaccacatgccatgcagaaaagtatatatggattgtccaacaaaaagaaaacaggtaacggacatgtacatatcaatgtcaacatgggcgggtgtcagtgttaccacttagcatcaggtaaagggcagacacaacataacaggacaacaacaacaacaacctactcgcttggggtagtcagaagaattccaggaaggaaatagcaggacagggaaccaacatcagcagctccatccacagacaaaagtgcgtgtccactcggatgccaccatctccgtcttcacaagccaacaggtcttctccccacgtatacacagcccatcctccg

SEQ ID NO: 30487 - DNA, 349 bp, Zea mays
  Clone ID: LIB3180-055-A2-F1A
ggtcaacacgcagcatagattctattacaccacaagtgtttcagggaggggaaaatccgacattaggctaatgggaagaaaaaaaagaatcccatagttacatcatcactcatgcctcatgcccgaaatggggagcctcatcatcttaaaattcatcacttgccccagaaaaccaatggccaccacaggttaatcttatgccgcttccgaaccgaagcccttaatagaaagggggaggatcgtcggcatcctggcgggggcccgttttcgggccggctaaatttggttttggaggccggcggtgtgcatcagcagggccttaatttcttcgggggacattccaggacca

SEQ ID NO: 30488 - DNA, 705 bp, Zea mays
  unsure at all n locations
  Clone ID: LIB3180-017-D8-F4A
gcagcttcgcgcacggacacgccgagctccgccggttccccggatcgcgcacctcgttcccaccccgcgccgggagaagagattatagagctggtgactttagagataggtttgataggaggcgctcacctcataggaggcattcccctgatggagattccaggggccatcgctcccttcgtgaccgacggccaaattcccaagaaagggaatctagctattcacggtctcccagtaggaagagtgaaatgaggcatgagaagaagcctgatgatggagaaactaactcatctaggagtctcagtgtctctgacaataatgatgatagaaaaaaggagacactgttaagtggtgatgataaagaggatcacgaaatacagctcaaacaaataagacaggacatggaacttttgcgtgatgataaatctctcttggagataattttggatgagaagaatgctgaagtgcgcaagatttctagcagattaaatgatcttgatctgcagctaaggaaggagaaagaggaatgccacaggatgacctcaaaaattaaaaagttccttaaagcccatgctcgctttttgaaagcacaggaagaattgaaaaggtcacaagctcgttttgagagaactcgtgatttacttgcttcagatattcntgaacgtgggtgctatgaagaagttctagtatcaatgttgatgaaga

SEQ ID NO: 30489 - DNA, 182 bp, Zea mays
  Clone ID: LIB3180-017-D8-R5A
atgccggcccgcggtgcgggggccccagcaccccgggcggcggtcgatccccccgtttttggctggggaattatcgctcgaccgatcgggctctcatcgggtgggtacggtttcgagagtttggaggagcaaagccctgtagtggaggcggcgaggaaggggaagacgggcggacgcgtggg

SEQ ID NO: 30490 - DNA, 728 bp, Zea mays
  unsure at all n locations
  Clone ID: LIB3180-030-G3-F5A
atgacaagcaccttggtacatggcgctctcgtccttggcgacgcgcagccgtcctcacggtccaccgaggaggccagcgagccgccgccgtcgccacgctcgtcggaaccggcgtcagacagggctggcgacctgctggcgctcgagctgttcgcgaccaggctgcccgacacctccgctcgtgacgccgtgcgcgccgaggcaagcaccgacgtcggcgacccttcgtcccggacccggtcgcgcagggacgtcttctccagccgcttgagctccggcgcgggcttcttggccgcgccgtccgctttgcgcgggtaagggtgcgccggcttcctcttggggcgcggcggggggatctggatcgccggcgcggcgcccgcggaggcgttgcttcctggcgacgattctcggaccaccttggtgaagaacttctgcgcgtggctccggatttgcacggcagtcttggtgccgatgtgcacttgtatgcggcgccaggcgcgaccgtgcagctgcagggcctcgaggaactgaccgtgctcgttctccgtccacctctcccgccgcttcgtgatcgtgtacggcttccgcgccttgggccgcacgtgctcctnccctgacaaatccatgtcgcggtggtcctcgcgacgatccacggcggtctcgccggtcgccatcggaatttgctccaaacagggcatctccagtgctcgggtcactggagaccaaac

SEQ ID NO: 30491 - DNA, 634 bp, Zea mays
  Clone ID: LIB3180-030-G3-R4A
gaaacgggagccctcctaacggtgccgcaggagcgagctcgtggaaaccgtggccggagctcatgtgcctcgttccccggcgggacggcttcgcggcgcaacccgtcgtgagcccgccgtgcgcggtgttctactacccgcaagcttcggcggcttcggctcaggagcaccagcaagcttcagagccgctggatcacagacgcgcgcagagggaagggtcgtcgccgacaggttcgagcgtggcctccagcgccgccgcggagtcccgccacggtcccgtgcaagagaacgccagcgacggctacgcggcgctacgggccgcaatcccgaggccgaccaagcgcgtgagctcggcttccttcggcgggagagggttcgtgccgtacaagcggtgcgcggccgagagcgaggcggcgcggccggtggcactggcactggcacccggagaggaggccgacggcgacctgacgaggctgtgcttgtgacaagagctgaaggctgcaatgcacatgctctctgctgaaacaggtggcaagagctttgtcgggtgggtcgggcacgacactggaaccaccatctaaaggtttgtttgacaaagcgttcctctggacaattttttttttttttttttttt

SEQ ID NO: 30492 - DNA, 622 bp, Zea mays
  Clone ID: LIB3180-048-P2-B7.F2
aaaaacactaattattattttatatttatgttaacatcaataaaaagatatccaaccagtttatcctaaaaaagatgagaaaaatgtcatggaaggttcctcgctaactttcgcaagtttaggtgtcttttccaccgccacgcgcgcgtcagcaccggtgataaggaagatatcagtgaaacgcggagaagctctcaaatagccacgaatttcaatagaaaagattacaaaaatggtctgaaagttgccagtagtcacaagtgcatgccccagaatccagttgaccaaaagtaacttaactgtaagtgaatttatcatacaagtcgccgatcttgtgaggctagagatccaatcctgaaccaataaatatagtcacaagattgtcctgactatacatacaacgggtgttgcacgcctagcttctttcctctgggaagatgcctcttgtatcttcacgagttcagcatcttatcgcctctgtggagcatgatcggcattctttttctagctaattcatcttcaaagtgtaatgcttgagcttttgcttgtgcttcttgttgcaaactatttctgtaatcttcagcttttttaactgggcaaggtcatctcgtatgccttcttg

SEQ ID NO: 30493 - DNA, 530 bp, Zea mays
  Clone ID: LIB3180-048-P2-B7.R2
aggggctttacatctgatgttatgttgccaaatgatcaaggattgctatgtgttactgctgatcagcagtttttgttctattgtcccaaaagaactgatgatggggactttgaactgtctctatatagacgattaataggttataatgatgagattcttgacttgaagtttatcggggaggaggaacaataccttgctgtagctaccaacttggagcaggtccgtgtttacgatgttgcgtcgatgtcatgttcttatgtactcgctggccacactgaaatagttgtttgcattgacacctgcgtcataccttcgtggtttctttacggcaggatcagagaagagtcgaggcttcgggttcgtgcaatttgcaactattcaagatgctgatcgaaccaatctacaaaagaatggatctcctgtttctggtaggaaaaatcagagttaagctagcaatggatcatgctccactgaaggaacatttgcaaaaggggaatatgcaagtgaaggactctgatggaaaccacgaa

SEQ ID NO: 30494 - DNA, 315 bp, Zea mays
  unsure at all n locations
  Clone ID: LIB3180-001-P1-M1-E12
agaaagttcatttagagaactgttggagaatagttttcatattaactatctaaattattgatttaggaagtcttttagagaactactggagttgctctaagggagataaaaatgacccaattttccgtcgtccttgtctttttaaccaaaccgtttgttttattcgtcacgttctccgagaaccggcgcagcgccgtgcgggcaaggacggaggatgtgatttacagccatgcggggttcttgatgggtgtgacgacggcctttgtnctgaggtagttgcggagggcgtagatgccctttttcccgcccgacgcc

SEQ ID NO: 30495 - DNA, 286 bp, Zea mays
  Clone ID: LIB3180-001-P1-M1-E6
ttgtttttttttattttttttttttaaatcagagacgttaccgagcaacatagaaaatgagattctgtcgatacagctcgacctccaaaccctacacatattctgaaaaaagcaacgaaccggtgccccttccccaaccacaagtacaggggcagttctagccttcaaatttacaggattacattgggaaaaaaaaaaacgaacattaaagacttgcagttgacacattgggtccgggacaatccatgatctaagatttctaggtaatgttcaaccaatgtacact

SEQ ID NO: 30496 - DNA, 321 bp, Zea mays
  Clone ID: LIB3180-002-P1-M1-B3
aaccatgagcaagctttgtttaattattacagtctacgagtacttattcaggcagatcactctgaggttgtgcctactgttgggcgctgccagcttgaccttgttggtagctgccactgccagcaggagtaagcacagccagctcatgcttcctaccgttcttgagctctgcagcttcctccatggagatggcatacgagctggcgatgacggcggccggcaagtcgctcaggacggagttctttccggcgacgtggctgaccatggtgtcagggttcgtctcgaaggcgatgtactggaagccttctccctgcgccttgg

SEQ ID NO: 30497 - DNA, 282 bp, Zea mays
  Clone ID: LIB3180-002-P1-M1-B7
aaagtaaaaaacggtaagagggcatgcatgaaacattaattttactcatgatcgaccacgacacacaacaattgagcacgcatgcaagctgtttttttttattcaaaaaattccgagggggggggacgacgacgacgtcctgctggtcctgcatgcatgtagtcctttacccacgacgggggtcgccgaaatttggggcgggcttcttcttcttcttgggggccgtgccggcgacgaggggcttgtagaccaccccggaaaggccggcgccaaccatgggcc

SEQ ID NO: 30498 - DNA, 176 bp, Zea mays
  Clone ID: LIB3180-002-P1-M1-C2
cttcctattgatatgatgttcggcgcaaggtttcaccgccgcacgggagcgtccctaggcgccagcaggcgaccggggcccgaggggagcaggtgcgtgtgcaagcgggtgatgcgctaccgctgccgatccggcacacgaaacctcatcttctcggcgctgttcgccgggtcaat

SEQ ID NO: 30499 - DNA, 55 bp, Zea mays
  Clone ID: LIB3180-002-P1-M1-D2
tacggcccgcgggactgaattgctgggtcgaccgcatccgttagttctagatcgc

SEQ ID NO: 30500 - DNA, 333 bp, Zea mays
  Clone ID: LIB3180-002-P1-M1-F8
agaccagcaagattacctgttccatcaaaatcagtttaggcaaacgacattacaacgagtgcagaccaccactcgtcagaatctagagagattgaaaaaaaaacagttcttttctgcttttggtgctcccacgacaaaatcacctgagtagctctcgagcaaacacgaccatacatttattgcgaccgtacaaacattgtaacaaaacccacgcgtccgcggacgcgtgggcgagagcggtgagcccggccaccagcgccggaggccgtcgtcgtcttactagccgacgctcgacttgggcatgaattgctagccgcgcgggtgagagattgc

SEQ ID NO: 30501 - DNA, 317 bp, Zea mays
  Clone ID: LIB3180-002-P1-M1-G11
atacacaccataatcatatttcattcttttaaaagctaggtgtagcaggacaattgaaagtctcatgcgatgagtgcacataattctcaaaaatacattaggaaattttggctagcggttaagtctatgtattttgttttaacaaaattacactacacacataccgacgtacgccgtacagttgtacatttgacctatgctcttgggctcaagtgttgagtgaccggcggcggcgagctggagttagacgtccccgtcgccgtcgtcgcacggctcgtggtcgaagtgtacggcacggtaacagaagacccaacgga

SEQ ID NO: 30502 - DNA, 278 bp, Zea mays
  Clone ID: LIB3180-002-P1-M1-H11
cgatccatgcaaagaactaagcaattttcattcactgggattgacacagtacgtgtggtggtggatcaggggaggagctactgctatggcggttatagagatggctcgtcgccttcggcgctgtcggccacctgccggtcgccgaggctggagcggcggatctcgtcgatccgcgtggccacctaggacatggcgggcctcctgtcggggtgctgcgcggagcagtcgatggctagctggaggagctgcaccatctgcatgtcgacgttttggtacct

SEQ ID NO: 30503 - DNA, 211 bp, Zea mays
  Clone ID: LIB3180-002-P1-M1-H3
aactcctaattcactcttttgatggaggacaatttgatgaggctatagtgtttgacaaactttgttttgtgaattagaggtattttgactgaatagttaagaaaactatacgaagtagtgtgaccggacacagccagacatttgatgatgctgctgcactgaaacactgacgcggaccacaataaaaaaccctgaaactttatcactactg

SEQ ID NO: 30504 - DNA, 162 bp, Zea mays
  Clone ID: LIB3180-002-P1-M1-H4
atgttggttgttttttatatacaatataaattataaaagagttgtaaccaaacaacacccaaatcccacaccaaatttaattattgaatatacgacaaaaatcatattatcttagactcccacacacgactatttgaagccaaaagcacgcatccattacac

SEQ ID NO: 30505 - DNA, 131 bp, Zea mays
  Clone ID: LIB3180-003-P2-M1-B8
tccgtacccgaatttccttttcgacccaccccttccgtaacttattgaccataacccttgtgcccggtgggaaaataaaatgttgtggggtgttctaatacaaaagcccttggcatggattggtggttgtt

SEQ ID NO: 30506 - DNA, 99 bp, Zea mays
  unsure at all n locations
  Clone ID: LIB3180-003-P2-M1-G4
gctgcggcgaccggtgggcgagcggccgccagtangttcctttgtcggggacgaggattcaactgggccggggccccatatttcggttccttttttttt

SEQ ID NO: 30507 - DNA, 144 bp, Zea mays
  Clone ID: LIB3180-004-P2-M1-C1
tcggccggtaatccccttcctaatcaccattcatccatccatccggtaggatttcccagccatgtcggcgactgcggggaagtttcccggggaggcgccgcccaggacagtgaagggcaccaacgtctttcttagggcaaccgt

SEQ ID NO: 30508 - DNA, 68 bp, Zea mays
  Clone ID: LIB3180-004-P2-M1-C3
tcttttttagattgcttatgagggataggtcgataatggaattttgtgggaagggaaaatcaaataaa

SEQ ID NO: 30509 - DNA, 119 bp, Zea mays
  Clone ID: LIB3180-004-P2-M1-G7
tcggagtcttcacgcggaagcagcgcctagcaccgcttctacccaatggcgccgacgttgaagctggcgatgggcattaagcgcgcgtcgcggtcgcacgcgtaccaacggcgtgggct

SEQ ID NO: 30510 - DNA, 284 bp, Zea mays
  Clone ID: LIB3180-005-P2-M1-C8
actcgcaatataaaattaccgatcggttcttaacttcacacgcaagcaattagttcatgcgcttattaggttgtgccactggccaccacttcacttcatttcacttgcacaagcaagcagcttcacatacttgtccattttacattaacgaaacagcattttttagaagatgtcccaacatttttgcaccacgcgcgagatcaggggcccttcaagccgaactttttagggggcgggcacgttcttcttggcgaggggcgcgatcttcttggctttgacccctt

SEQ ID NO: 30511 - DNA, 261 bp, Zea mays
  Clone ID: LIB3180-008-P2-M1-F8
acagggagcgtgcgaccaaaggcatgggtcttcgcaccctggcatcgaagaaggtcctatccttcccgttcggcggcgcgggccggccgttggcggcggcggcgtctgcgaggggggtgacgacggttacacttcccgaccttttctacgacttcggcgcgctggaaccggccattttgggggagatcatgcgcttgcaccaccaaaagcaccacgccacctacgttgtcaacttcaacaaggggcttgagcagcttggca

SEQ ID NO: 30512 - DNA, 294 bp, Zea mays
  Clone ID: LIB3180-009-P2-M1-B3
aaaccaaaactctatggttaattttaaccttgaaagtattatatttataaggaggacaacgcatgtggcacagatgggcttttcagaactaattaaagtatcacaaccttattgaagcatgcatgcatgcatttgccagatttggaagaaggtttattcccacaccggcaaccccacacattcggtccaggaactaatacccaagttttacaagaccgttgtattcaccaaaaatgctttcattgatttttaaaacaagaaccaatatggactattatgaggcgaacattccgc

SEQ ID NO: 30513 - DNA, 292 bp, Zea mays
  Clone ID: LIB3180-009-P2-M1-G2
aggaaagcggaagggggaaactctatttttaattgacaccttgaaggtcttatatatattgagaggacaacccaacgagattcatgggctttccagcatttattaaagtatcagaaccttattgtagcatgcatgcattcatttgtccgtttttgaagaaagtttttcctcaccttgacaggcccacacatttccgtcaacaacgaagtccccgcttttactccactggagcatagaccacacatttttttgttcaatttttaacccacaattaattttgcctattatcatt

SEQ ID NO: 30514 - DNA, 305 bp, Zea mays
  unsure at all n locations
  Clone ID: LIB3180-009-P2-M1-H5
tctttcgacccacgccttctttttgatcctttttgggttcacttcattgccgggtcaactcaataggtgggatggcgtctcccactttctccccatcattcactgtccccctcctcttacaaaatattacaacgttttttaatcaccttatgaaaccttttaccatcatcccctttttcctcctcttttttttcctcttctccaaaatttcccattactatcnncaggttggttaattttcatatcaaaattatcattaaaccccattttccattcctttttattaaccccttcaaaaatttctt

SEQ ID NO: 30515 - DNA, 199 bp, Zea mays
  Clone ID: LIB3180-010-P2-M1-A3
ggtggacccacgcatgcgtatttgcacctacgcaacaccaggcgcttcagcagaacaacacttggagcttggctggccgacgggccaccatgatcattcccaagaagaaccgcaatgagatctgcaaggacctttttaaggagggcgtgctgtatgccaagaaagactacaacctggcgaaacacccacagattgatgt

SEQ ID NO: 30516 - DNA, 386 bp, Zea mays
  Clone ID: LIB3180-010-P2-M1-B2
tttttggttttttttttaagcgggccggcccctaaaacatttaatttcttttttgttgcaaccataaaaaaccgaatgatttgcccccccaccccttcccttattttgaaagaccggatcaccccaaaaaaaactcgctgttttgggaaatccacccaaaaaacaaacttcaaggggttgggaaaaaaaaaaaatgggaggaatggaaccgcttaattaagcctccccttaaatttttttctggacggagtaaaacttggtgctcaggaaaaaggaccccaaggttaatggcaccaacctcactttatcccccttgttgggaaaaaaaaattcggggttcccaattgcccaaggggggtttttgaaagaagggggaaattgggggg

SEQ ID NO: 30517 - DNA, 270 bp, Zea mays
  unsure at all n locations
  Clone ID: LIB3180-010-P2-M1-F12
tttttttggtttttttttattgggagggggggcacttttccctcgattttcttaacaagaaaaggtaattggggcaacaaaaccagtgcattttacccccataaagccccccaagaaacctttgcaaaccaccggcttccccaactggaaaggcctaaaaacaaacaaacacctcangcccaaaaaccaagatccaagcaccaaaagcacgaaaccctccaagaagaaaaaaaacccaaacccattcaatgaaaaaaaacgacccgcggc

SEQ ID NO: 30518 - DNA, 329 bp, Zea mays
  Clone ID: LIB3180-011-P2-M1-E10
gaaacctggacacaaacttcttcctttgttttttttctgggagggggttgttctgagaagggttgaaacctgaccacacactgacgataaaggtgaaaccctggaacagaataatacaggatgggcacaggacaaacactaacgttttattgctactgtgtactacacaagctggaggactggagcgccttcaacttttcatgcccatttgctgtgcgacatgcctgccctgcaggaggagcaagcttgcaatgaagctctaatcctccatcctcatgatgcagcgcaagctctcccccttgagcatcaagtcgaacgccgggttgatc

SEQ ID NO: 30519 - DNA, 142 bp, Zea mays
  Clone ID: LIB3180-011-P2-M1-G2
aagaacccggaaatgtaacctcttatttttgggtggccccatacctcctccaaaaaaccctttttttggaaccccccctctacccactgtgggggggccccccccccccgttgtgccaccggggggacccaagatttttccc

SEQ ID NO: 30520 - DNA, 81 bp, Zea mays
  Clone ID: LIB3180-011-P2-M1-H3
tttttgtgtttatgagatgatggcggagatagggacaaaataaatgcaacgaaatgattgataccacagtactggccaggg

SEQ ID NO: 30521 - DNA, 209 bp, Zea mays
  Clone ID: LIB3180-012-P2-M1-A8
atgcgggaacagactctgaaaagtaggataatttaccaaccaaaaaccggaactttatgttctgatggatccgcgtcacacaggccacaagtttcttcagttcatgtaactttggtgcagccaaaattaatgtcactgcagttgcttatttgggtgtaaagggtttgaacaacaaagagaaaaacaagcatctcaacaggagatggacc

SEQ ID NO: 30522 - DNA, 70 bp, Zea mays
  Clone ID: LIB3180-012-P2-M1-B7
tttttttttttttttttttttttttttttttttttttttttttttttttttttttttttttttttttttt

SEQ ID NO: 30523 - DNA, 244 bp, Zea mays
  Clone ID: LIB3180-012-P2-M1-G3
ggtgacaggtgaacgagcagggatttttattccaagcaaaaggtgcagccaattcttaccatactaggaaccaggccagcgctgcccaaaaacgctcaaacatgaaagaaataaatcaaggaaccaaagttcttggaaaccaattacacattacttcaatacacgacttacaatgtgaattgcggtgtaacatatcgaaatgcatgcgatggttcttccgcctgggctttttcatcttcttctt

SEQ ID NO: 30524 - DNA, 350 bp, Zea mays
  unsure at all n locations
  Clone ID: LIB3180-013-D2-F2A
aaaatatagatctctaatactttattactgagaggtcgcacatatcagcatgagaactttattattacagtataaatcataaaaaatctagaagatggcaccaccaatggtgggcggttgcaataaggtggtaggattcgtcaaagcatgttggctaaatggcaacaattgttgttgttgtaagaaggcaacaatgtttgccacattctgtgggtagaatggtagcaattgttgctgttgcaagaaggcattaatgttttccacaacctgtgggtaaaatggcaacaaaatgtnttgtctcaagaaagcagcaatgtttgccacagcttgtagatggaatggtagaagct

SEQ ID NO: 30525 - DNA, 445 bp, Zea mays
  Clone ID: LIB3180-013-D2-R2A
tagcaacatacatagtgaagtacactagcaacatcttagcaccaatgggagccaagatttttgccctccttgccctccttgctctttcagcaagcgctgctacctcgacttttattccacaatgctcacaacaatacctctctccggcgacagccgtgggatttcaatacccaactatacaatcctacatggtacaagaggccatccaagcaagcatcttacggtcattagcattaaccctccaacaaccatatgctctattgcaacagccatccttagtgcatctgtatctccaaagaatcgcggcacaacaactacaacaacagttgctaccaacaatcaatcaagtagttgcagcgaaccttgctgcttacctccagcaacaacagtttcttccattcaatcaactagatggggtgaaccctgctatctacttgcaggcaca

SEQ ID NO: 30526 - DNA, 439 bp, Zea mays
  Clone ID: LIB3180-013-P2-M1-D8
tcgcccaccgccgtttacatacatagtgaagtacactagcaacatcttacaccaatgggagccaagatttttgccctccttgccctccttgctctttcagcaagcgctgctacctcgacttttattccacaatgctcacaacaatacctctctccggcgacagccgtgggatttcaatacccaactatacaatcctacatggtacaagaggccatccaagcaagcatcttacggtcattagcattaaccctccaacaaccatatgctctattgcaacagccatccttagtgcatctgtatctccaaagaatcgcggcacaacaactacaacaacagttgctaccaacaatcaatcaagtagttgcagcgaaccttgctgcttaccttcagcaacaacagtttcttccattcaatcaactagatggggtgaaccctgcta

SEQ ID NO: 30527 - DNA, 306 bp, Zea mays
  Clone ID: LIB3180-013-P2-M1-F1
ggatccaatccacattacataaaatagttaaatggttattcatatttgcatattgcagttgagatcagcctcgggtatgccgaaagaatatgggatgagaatagtaagaaagaatttacaagaatttcttgaagtattcatttgcttcggccaccagatgctcgtcatcccattcatcacggtaactctcaggacgagctgccttgttcattgaagttacagcatacatctgcttcctccattcttcgactggtggatggccacattgctcagcgagccaaatatcatacctaaaactggtaattt

SEQ ID NO: 30528 - DNA, 328 bp, Zea mays
  Clone ID: LIB3180-013-P2-M1-G11
ggagcaagcaagcagataaaataatgaaatactcgtcacatatgccatggctggcatatcaagcagtgcaggtgaacaaagtctttgtggtagcatacagcatgctacgcacgaaagtactactacataccgcataacttgagcaaatacaacaagcaaaccataggcaagccccggaatgaaaggaaacaagggtacaaatgtggcagggcccaaaccacccttactcgtcttggatggcctcctcgtcctcgtattccgcctcctcatcagcagaggcatcctggtactgctggtactcggacaccagatcgttcatgttgctctc

SEQ ID NO: 30529 - DNA, 104 bp, Zea mays
  unsure at all n locations
  Clone ID: LIB3180-013-P2-M1-G12
ataaattagttttgtactaaataactactaaataccgattaattaagcaanctcataaataaaccataggcaatttttggaatgaaaggaaacaaaggtacaaa

SEQ ID NO: 30530 - DNA, 387 bp, Zea mays
  Clone ID: LIB3180-013-P2-M1-H8
agaaaccgcaggctcaccattaccgacagaagtccaccacaccaaagcagctggcgaacaatgcgctgcttcatgtaacgtgattacataacttctagctgacccgaagaagtcgcatttttttttgaaccgtttagaccaccccaagaaacaatcagaagagaaagtagaccccacatcacatacctaggattaacaccgacttacaagctttgcctatcactagctaccataaacctttccatgcagctgccatgtcacgaccagacttgatttcaaccacctgcgaaagcagcagcgccatggacaaaagaggacagcagcgactcacttgatgtactgagacatccatttgaagccttcgccatagcccatcttgcgcaccac

SEQ ID NO: 30531 - DNA, 326 bp, Zea mays
  unsure at all n locations
  Clone ID: LIB3180-014-P2-M1-A1
aataaactcaactacatttttttgaattcaaaatagagacaaatgctccatgcatgattacacaacaaggactgtccaaagatagacctaacactgctatgcctgctgaattgacctttacgctcatcaacatctgagtaaggcctcacagtttaatgtcactacaccacaaggactgtccaaagatagacctaacactgttatgcctgctgaaactaacttgttcagatgctactctgtgtaatgaacccaaccaaactgagcaaanttgcagagtatcagggtccatatgagattgttcgttccagataggttggcaactgaca

SEQ ID NO: 30532 - DNA, 191 bp, Zea mays
  Clone ID: LIB3180-014-P2-M1-C5
agaagggggggggggttagaaaaaaaaagggttccccggtacacttattattcatccttgaacacaaaatctagacaccgccttttaccctatgttttaaaaccaaggagccagacattatcttataattccaactaaaaattacaatatcttgttacagttatgaatattatatttttttagcccatatt

SEQ ID NO: 30533 - DNA, 478 bp, Zea mays
  unsure at all n locations
  Clone ID: LIB3180-014-P2-M1-F8
gtgggttattttataaaaagtagagggggattatataataatatatnttnaatatattattattaatatattaaatataataaaatataatatattaaattatataatttattattttaaatatttattttttcaatattaattataaatataataatttttattttttattatttatataaaattaaattaatttttaacttattatttaatatattaaaatattaatatatttatattattttataaattatatatatatagaattatataatatattttatataataatattatctatatattaaaattttattttatattatattatatttaattaataattaataattaaaatattttatataaaaatatttaaatatattttaataataaaattatatataaattaatattttaaattatataataaacttatttaatttattaaatatatatattttatattatttatata

SEQ ID NO: 30534 - DNA, 54 bp, Zea mays
  Clone ID: LIB3180-014-P2-M1-G6
gtggttttataataccaaaggggggggttaaatattattttttaaattttttat

SEQ ID NO: 30535 - DNA, 308 bp, Zea mays
  Clone ID: LIB3180-015-P2-M1-D1
tgtgtttttttttttttttatccagatccttctccttggatttttccttttctccatccttccccttctctttatctctgtcttcactctctttcactagatcatctactttaacttctagttgacgttcagtggcagaagttggaacattgtcatgtagttcagtctcttgttctgaagtggactcaccagatagctcacggcccttaacatgttgctcatttgattttggttcaacctctcccagtaatacagctggcacaaatgctctgagatcaagtaaagattcataaaaagctttggtatct

SEQ ID NO: 30536 - DNA, 154 bp, Zea mays
  Clone ID: LIB3180-015-P2-M1-D8
gaaaacaagtaggacaacttgttatcattgacgacataccaaggactgacctatacagttctgtaacgccaacacgttgatttccgttcttgtataggtgagccatgtgagctcgcttacagcagtagcaaaaactgggcaacagaagacaaac

SEQ ID NO: 30537 - DNA, 219 bp, Zea mays
  unsure at all n locations
  Clone ID: LIB3180-015-P2-M1-H4
aggtaacagacccaccaattactaagacatcatncagaaccaactgaccaaaaccaagcattgacacctaactaaaacaaggcggccaaccaaagaaaggtgaaagcaaaactctgaccaaaccacacacgcgaaaggaaccaaaaaaaactggacctgcaagagccctcccaaccaacactacacaaaaaaccttggcaagacaagggaaaaacagca

SEQ ID NO: 30538 - DNA, 239 bp, Zea mays
  Clone ID: LIB3180-016-P2-M1-A1
cagcaaaaggatgttaaacaaatgcaacagtagaaaaagaaatcaaggcacgaacacggccatactggaacgtccgaaatgtatccatcaatggttcatgggcatacacagtaaaacatagtatcagaacattattttggaatttggatggatatgccatgccaatgaagcataaacgactataagatgtgggcaactcaaagaattcacattattgccaacaaaacaaaaggacaact

SEQ ID NO: 30539 - DNA, 367 bp, Zea mays
  Clone ID: LIB3180-016-P2-M1-A10
caggaaaccatcacaactcgcagcattatgagagcgactaattcaaattaaattaatcttactcaggggcacaacagcggggggtgagaccatgaaccctaactctcctagctagcttagcttaagtagcagatcgacacgtcgtcactgaccagagcacagacgacgcgcaagaggaccgtttcatagcagcagtaccaacctaaccatcagcaggttcctttccttcctctccagcccaaacaccaacgaatggggcgcctgttagttcgacatcatcttcatgtcagaatcatgcctgttctgctggtgcaccgagagggaccagcccccggacgcgtaggcaggcggcatgtgctgctggtgc

SEQ ID NO: 30540 - DNA, 311 bp, Zea mays
  unsure at all n locations
  Clone ID: LIB3180-016-P2-M1-D10
ggggaggcgggtgnactatctttcatttttatttgtagtaaatggtgtattcaattttatatttctttattctgggtagttttttttaaattgttttatttagattaatttttttttggttgtctttttttgtttctattttattttttttttttttatttttttttttttttgttttaatattttattttatattttttttttatattttttttttgtattattttatttttttattatttttttttttttttattttttttttttatatattttttttttttatttttatttttcttttttttttattt

SEQ ID NO: 30541 - DNA, 265 bp, Zea mays
  Clone ID: LIB3180-016-P2-M1-D9
aatactgggggcggcctaaaacataaacaaactcaatgatcataaacaatactaatcgccacaaaacaaaccaaacacaacatacaaaatacccaatcagttactaacaaaatcaaacgaaaacccgatcccaaaaacaccatcactaaaacaacctgtttaacaaaatcaacttcctaaaaaaaaaacaaacccaccagacccattttcaacaaaacccaacttaaaacaaatttaaattcaaaaaaaaccacttcccccaaaa

SEQ ID NO: 30542 - DNA, 330 bp, Zea mays
  Clone ID: LIB3180-016-P2-M1-F10
atgacaatatatatatatagcacaatagttcatgtacattaattagtacaggcagcctaaccatgacacacactgtcccgaggaacagcccgttctaccaactactgaggattcagtacctctctagtcgctcagcttatcactaacagtacatctgacgggacctggtagcagattatatattatagatcacacggacgcgcgatgcatacaaagatacgtacgtacacaaatacgtagtagtagggtagggatagcataacaggttgcctggcccatcagcatggatcggatcgcagttgcaggcaaagcagtggcagtcccatggag

SEQ ID NO: 30543 - DNA, 271 bp, Zea mays
  unsure at all n locations
  Clone ID: LIB3180-017-D8-F2A
attntnnngcttaaaccgcatccaccaaggatcattaatgacgattctttgtatgcaaggtaaacttcagcatcaaatacatattacataatgctttacacaggcgcgagagctatatagcttattccagtaccttattgacattctacttattgcacttagtgttccttatcatgaggctagtactgatcttaagtattaactactgagtgtggctgagggcgcatagcaagtgatagagaattgtcacctgttccacttcctatctatg

SEQ ID NO: 30544 - DNA, 82 bp, Zea mays
  Clone ID: LIB3180-017-D8-R2A
tgcgtgcgtgcacgcttgcgtatgttataccgttacttgatatcttcactacaggtcatgggcttatgccaactcctgagac

SEQ ID NO: 30545 - DNA, 342 bp, Zea mays
  Clone ID: LIB3180-017-P2-M1-A2
gactgaacggctcgacccacgcgtttcttttgtacaggccaacactgacggtggcaggtgaccaacgaaccccgggtggctctacagcgactccgtcggcggcttgccttcccgcgccgcgccgggcccggatcgctcgccctttccgactgtcctgctcaacgccgccaccagcacgtactttcccgcgccggaggtcccgctcggctgacacaacggagcggcgcaagctcccccactggttctgaagatgcgagaaagaaaaagagggggagaacgagggtggcgtctatgggcaccgcggaccaatcagaatgagagctgagtgatggctcgcaagcg

SEQ ID NO: 30546 - DNA, 239 bp, Zea mays
  Clone ID: LIB3180-017-P2-M1-A3
actgaccgacccggactgaattgcccgaaccacgcgttcgtgtacgcgtgggtgggtacaaccctgataagattgcctttgtccccatctctggttttgagggcgacaacatgattgagaggtgcaccaaccttgactggtacaaaagcccgaccctgcttgaggctcttgaccagatcaccgagcccaaaagaccttcggacaagcccctgcgtgttcccctgcaggatgtgtacaag

SEQ ID NO: 30547 - DNA, 428 bp, Zea mays
  unsure at all n locations
  Clone ID: LIB3180-017-P2-M1-B10
acgacaccaacgcgtctctgcgcccttcgcttggacaagctacgaccaataagttggctgcaagcctctctcgatcgtcaaagaggaaaggtgacggaagtttgcaagagcccggtaccgccacaagcggtcaaagaaagggcgccgccaccgagcaagtgatcaaggatcgcccgtctctttcgaccctctgcaagaacagtctggnccttctgttagcaattgccaaagcctgttaccaaaggcggttaccaaaggcgtcggctaacggtggtgctgggagggagcctgacgagatgtgtgagctgtacccataccttgcggaggaggtgagggcccttcagaaggcacacccaggcttgttcaagcgggagtttgggatgatcgaagacagcaaggcccgtacactggacgagaggatcaaagag

SEQ ID NO: 30548 - DNA, 177 bp, Zea mays
  Clone ID: LIB3180-017-P2-M1-H1
gtagagactggcaaatacaaaatccatcttacgtatctcatttggctacaggatgcggtcaagagggtttcaaatgtgagaaccacatgtcggtggagcaaatcaagttacagaggggtaaaaccaagacatggcggttgggcaaatcaggttacaggggggtaaaaccaagacaag

SEQ ID NO: 30549 - DNA, 184 bp, Zea mays
  Clone ID: LIB3180-018-P2-M1-E11
gcgacgcacaaggggaaaccatccattggcacaagtcatcatgaaacacggtacagggaaggagggagggaacaacgtctcagctggatctatttttttttatgagatagtacagagtacacatgggctagcggaaccgaagaacgagaaccaattcacaggaagttaaaaaaaaaccgtcgct

SEQ ID NO: 30550 - DNA, 383 bp, Zea mays
  Clone ID: LIB3180-019-P2-M1-C12
gtgttttttttgacaaaggaacaggccaaccttttggctttattttttttaccatttcacatcatccccctcttccatcccagtatgttcatccaccgccctcaccttccaaagcaccgccgcaaaaattaccataactaggcttaaataaagacatgctaggaaaaaggaatactacttaatgacagccaccaccaccactccttgtgactttaccttgagagcattaaagtctaaagaaagaattgggaaaagaaaaagggttaaaacaatttggaaaaaaaggagcagggcttcagtaaaatcttcgacttttcgatccagctgcgacaatacccgcttgactcggcctgcggactgccgtctacccccattgcgatggt

SEQ ID NO: 30551 - DNA, 143 bp, Zea mays
  Clone ID: LIB3180-019-P2-M1-D12
ctagaaaaggactttgggatttctgggaagccacaaacatcagacaaaaaactttattattgaactataactcataagaaatctaaaagagggcaccaccaatgatgggttgttggtagaacgctgctgggtttgtcaaagca

SEQ ID NO: 30552 - DNA, 349 bp, Zea mays
  Clone ID: LIB3180-019-P2-M1-F9
ttgggtttttttttttttttttggggtttttttttttttttttttttttattaaacgaaaactttttgtttaattgacaccttgaagggctttttttttttgagggggcaacgcagcgggatgcatgggctttccagcatcgattaaaggatcagaaccttattgtagcatgcatgcatgcatttgccggttttggaagaagggttttccttacattgacaggcccacacatgccgggcagaaacgaggaccccggtttcactccactggagcattgaccacacatgttttgtttggtgtttaaaccgagaatgaatatggcctttttttatgcgaacaagcggggggg

SEQ ID NO: 30553 - DNA, 74 bp, Zea mays
  Clone ID: LIB3180-019-P2-M1-G1
tcggagttaggggacgacgcattgttagcaagatggtccaacatggtcacttcaagcctagttctagatcgcga

SEQ ID NO: 30554 - DNA, 93 bp, Zea mays
  Clone ID: LIB3180-020-P2-M1-B8
tctttcttgggacgattcccacatctggaccatgggagcacattcctctgagggacttttagaagaacccacgcttggaaggtccagagctac

SEQ ID NO: 30555 - DNA, 120 bp, Zea mays
  Clone ID: LIB3180-021-P2-M1-D5
ggttcgcccaccccttctttctctttcaaaagcccctcggccagcagggtcgtccccctccccaaaaccaagccagctgcctccgacagcatccaccttttcctcccccaaaccatggac

SEQ ID NO: 30556 - DNA, 252 bp, Zea mays
  Clone ID: LIB3180-021-P2-M1-E2
ttggaccaacccgtccttaactcgccgtctgccttctgcgcctccggttcggcctttgtcccttgcaggttcaatctaacctccaaccatgggtaaagagaagtcccacatcaacattgtggtttttggccacgttgactctggcaagtcgcccaccacaggacacctgatctacaagcttggaggcattgacaggcgtgtgatcgagaggtttgagaaggaggcttcttgaaatgaacaagcggtcctttc

SEQ ID NO: 30557 - DNA, 360 bp, Zea mays
  Clone ID: LIB3180-021-P2-M1-G10
tttttggggttaaccccaaacacatgggggggattattttaaaaagaaccaaatactcctgtccccatccgcttaattatcatgctaacaacaacaacaacatcatccgctggctttcgctgcgcttccacttatagcttctccctgaaccccaggaggaagcacactatcttaacccccatcgatccgtgcagagcgccagcgagaacaacagcaaaattaagattcaaaagcttgagaactactaaagcaactggaacatcaactaaacctactgtaacaacgcagcaaacggacaagcagcaagagatcctgcttgctagccaatgtgcttcgttctcacatgcctaatttctaaaa

SEQ ID NO: 30558 - DNA, 407 bp, Zea mays
  Clone ID: LIB3180-021-P2-M1-G11
tgttctacccactcgttcgattttccgctccacaccttttctttgccgtttttttaaaaacagtacagccgcactaatcacacttttaccaaactctcctttctccatcccctcaattactcaacctaacacacaccaacaacatcatcccttttctttttcttctcttccattaataacttctccctcaaccccaacattaatcacactatcttaacccccatttatcctttcactactccatctatatcaacatctaattttaaattcaaaatctttataactactaaaacaactagtacattaactaaacctactttatcaacccatttaacttacaatcatcaatacattcttcctcctttccaattttctaatttcttacattctctatttctaataatata

SEQ ID NO: 30559 - DNA, 110 bp, Zea mays
  Clone ID: LIB3180-022-P2-M1-E12
tctaacaaagaaatacctaccctaaccggcggcgacgatcgtatacctgggcggtgcctctaccgaagacaaggtcacgtactagggcatagcaaccggatatacttttt

SEQ ID NO: 30560 - DNA, 162 bp, Zea mays
  unsure at all n locations
  Clone ID: LIB3180-023-P2-M1-C10
ttgttntttttaaaaataaagaatgggtgagaaaaaaaaaaattcaanattaatttcttcttattatattttatttttattttttttattatctttttttctttaatcatttttttttttatatttatcttataataaaaatnttttttttttttttttttt

SEQ ID NO: 30561 - DNA, 176 bp, Zea mays
  Clone ID: LIB3180-023-P2-M1-D6-F2A
ggcaagagagacacggggagttatacacagggggggaagccgctttccccttgagagggaccacccgggatatgaagaacccccctttccacccgttaaaaaataacaccagccccaaaggcaaacgtgttaaaacaaaaaaagaaaaaaaccgcaaacgtttaaaatccaggggg

SEQ ID NO: 30562 - DNA, 393 bp, Zea mays
  Clone ID: LIB3180-023-P2-M1-D6-R2A
gtaccggcccgaatttccgggctggcccacacgcgcccactcagcttagtgagccccatgaatactacctgcaaacacgtcgccctggaggacaggcacgcagcactgtcaaaccgtgatatagctgttacgaatagagaaggctttcatgcagctttttaggattactagtctgagctagcaacgtttactcgttacataagtctacgtgtcattgccgatctaaaacatgcatacttgttccactctgccaatattgtatccagcattgaaggccatcgagattatgaactatttcctaccgctagagtcttgaaacgaggtaaagcctgcggatgctacactgaaggttgtgttccataagatgggggttaacgatcaggccgaatgtgt

SEQ ID NO: 30563 - DNA, 227 bp, Zea mays
  Clone ID: LIB3180-027-P2-M2-A9
gaagacaaagtccaaattattccaaaaccacggcaaactgcccattcatcgaactataaagtttcttttctgtcatttttattccaggagctgtggcctgggtgggggcaggggcatacggcaacggcgacggcgcctagacggctggaccgagagggaggcggcttgcccgcctagaggttgaacatgacttttatggcatcgcggccgcgggcgctgaactggaa

SEQ ID NO: 30564 - DNA, 123 bp, Zea mays
  Clone ID: LIB3180-027-P2-M2-F7
tatttttttttcgttgaaaacgcaggataaactttattacaccacaagcgtatcaaagaggagaaaatccgcctttggggccatgtgaagtaaaaaaaggagcccatgacgcaagatgaacta

SEQ ID NO: 30565 - DNA, 227 bp, Zea mays
  unsure at all n locations
  Clone ID: LIB3180-027-P2-M2-G2
attagaaaaangtatttattaaaacacggtaagggagtaggggaggggacgggagagccgaggcccgaagaaaaaaagaagctacgcgtagccgattgggctcaaaatgagaagtcaaataatgtttgtcaaagaatagagaggtggtaaaaaaaaatatttttaaaaatagaggggtaaaaatgtatataggacatttttttattggtatatataaaagatgaaaa

SEQ ID NO: 30566 - DNA, 209 bp, Zea mays
  unsure at all n locations
  Clone ID: LIB3180-027-P2-M2-G3
agaagaaaagagggatnnnaaaaatanttttaaaaatttttgattttttgtaaaggggggaaaaaaatattgtaatttgaaaaggaaaattaaattaaaaacttccggtaaaatgaagaaaccaaatttttatgaatttaaaaaataaaataagcacaaggaaacttttttttataaaaaaaattaatttttataaaaaaatttaaaaa

SEQ ID NO: 30567 - DNA, 121 bp, Zea mays
  Clone ID: LIB3180-028-P2-M2-F9
gcgatctaaaacggagcaaggagagctggtcgtaattgcaggtcccggcgggggcattcccttggaagccacaaggtggcaagaccggcggcctaaagttcccttgccgggcgatgtttcc

SEQ ID NO: 30568 - DNA, 155 bp, Zea mays
  Clone ID: LIB3180-028-P2-M2-G7
gaaattatgaatcggctgaaaatttatataaattattacaagaagctggcccgctttatatgacaattgacagggtatgggcggcactatcacacaattaaacacctgcgctgcagggcacacacacgaacgaacgaacgaaacctgcggaaaac

SEQ ID NO: 30569 - DNA, 200 bp, Zea mays
  Clone ID: LIB3180-029-P2-M2-C4
aacgaaacctttttgttaaatggaccccttgaaggccttttatttttagaggggccaccccaccgggatgcttggcctttccagcttcgataaaagtatcagaacccttattgtagcatgcatgcatgcatttgccggttttggaagaaggtttttcctaacatggacagtcccacacatgccgggcggaaacaagtacc

SEQ ID NO: 30570 - DNA, 365 bp, Zea mays
  Clone ID: LIB3180-029-P2-M2-E6
ccccagaggacttgtcgcgtgctcggccatggcatcgccaccgccggccctcgagatcctagttcgcgagcccgacggagtcacggtgtggtccggacccccctacccgccgggcaccaccagcccgccgcagagactccccaagacggcgtgcagcgccacctttttctccaccgacggtgcccgcctgctcgcgacggtggcatcggcctcggccaccgtctacgactgccgcacactcgctgtagtcaagtgcttcgagctcccggtactcctcgccgctgcgctatcgcccacgggggcgtatctgcaaaccttccagaagtcatcctcgccgtaggagaagaatgtcacggtttggcacg

SEQ ID NO: 30571 - DNA, 282 bp, Zea mays
  unsure at all n locations
  Clone ID: LIB3180-029-P2-M2-E7
tttgttttttttttttggttggggggtngggaaaccatgcatggatgctgcaaaactgcatagcttaacatgcttatatctgggtgcgtacatgaatacagatagactttccctttaagccactctgcttgcttacaaactagggtaccattaggtgtgtgcatgaaaaggagacagcacagcttattgctttttgcgagagaagtggttgtcgttcggattccttttcccgctgaacattgccagtgccttgccaactggaggtttaagtgacgccttttt

SEQ ID NO: 30572 - DNA, 252 bp, Zea mays
  Clone ID: LIB3180-029-P2-M2-F11
gcgaaatccacaaatcgattaagacaatggtacgacaccagaagcgaaagaagacaaagtccaaattattccaaaaccacggcaaactgcccattcatcgaactataaagtttcttttctgccatttttattccaggagctgtggcctgggtgggggcaggggcatacggcaacggcgacggcgcctagacggctggaccgagagggaggcggcttgcccgcctagaggttgaacatgacttttatggcatc

SEQ ID NO: 30573 - DNA, 251 bp, Zea mays
  Clone ID: LIB3180-030-G3-F2A
gcaaatcttcaaaaaaaattttaaagtttttaacaaataaggtttaattttatccaaataaaaaatccggctttttacaaatttttttttttttatgaaaaaaaaggtgttttttggaaaaaaaaaaaaaataaaaaatttttgacagggaacgtttttcaaaataaatttttaaatgggggatacagggacaggccttaccccacaactaaaatttttgcctacttttttgagagagcggattttctttt

SEQ ID NO: 30574 - DNA, 449 bp, Zea mays
  Clone ID: LIB3180-030-G3-R2A
ggcttgggtcggattgacttccgaaagtttggtctccagcgacccgagcactggagatgccctgtttggagcaaattccgatggcgaccggcgagaccgccgtggatcgtcgcgaggaccaccgtgacatggatttgtcaggggaggagcacgtgcggaccaaggcacgtaagccgtacacgatcacgaagcggaggaagaggtggacggaggacgagcacggtcagttcctcgaggccctgcagctgcacggtcgcgcctggcgccgcatacaagtgcacatcggtaccaagactgccgtgcaaatccgtagccacgcgcagaagttcttcaccaaggtggtccgagaatcgtcgccaggaagcaacgcctacgcgggcgccgtgccggcgatccagatccccccgccgcgccccaagaggaagcctgtgcacccttacccgggcaaa

SEQ ID NO: 30575 - DNA, 212 bp, Zea mays
  unsure at all n locations
  Clone ID: LIB3180-030-P2-M2-F7
cccaccgcgtctcgggagaaaaagtgctttnnccgaggaataaattttgtttccattcggaatgtcttgaaactatgttggggtgtatccttagtggttgggttgagcattaatggcttcatanttttgtcagggtcatatgtgtcgccgtgaaactttttaatcaaatcnagttcacttcttttgcctctaaaaanaaaaaaaaanaaaag

SEQ ID NO: 30576 - DNA, 118 bp, Zea mays
  Clone ID: LIB3180-030-P2-M2-H8
tttttttttttttttttttttttttttttttttttttttttttttttttttttttttttttttttttttttttttttttttttttttttggttttttttttttttttgtttttttttt

SEQ ID NO: 30577 - DNA, 77 bp, Zea mays
  Clone ID: LIB3180-031-P2-M2-C7
aacaagaggcaaagattgatcatcaccatttatgaaaaccatccattcaccaaatatctttaataactttttatgca

SEQ ID NO: 30578 - DNA, 169 bp, Zea mays
  unsure at all n locations
  Clone ID: LIB3180-031-P2-M2-E4
tgnaagaaacagggccacatttccaaacatctgtcaaacaaacatttttaggggtcctgtaacaacaaaagctccataaccaacttttacggtatgcataatccaacaaaccggtgaatattcaagactcagaatattgtagacacgtatctatggaacagctatttat

SEQ ID NO: 30579 - DNA, 347 bp, Zea mays
  Clone ID: LIB3180-031-P2-M2-F12
agcagaaaccacccaattattattggcaaacacctgattgacattgcgattctcatatggttccctgcgaacaactaccaaatgaaaacctgagaggcgaccaaaccggagggcagggggcaattgtgagcctatcctgctgacattgtagacaaaatccataacccatcatcatcatcgtaagtgtggcagcaatgcagtgccatggcaccctgcgccaccacaaggaaagacatcggtacaggaccttgccgcgcatgagagaggcatatctactccttgtatttcatgctctcaagcgtgaacccaggcatgtcgaaggagtcggcaaacttttccacctggac

SEQ ID NO: 30580 - DNA, 120 bp, Zea mays
  unsure at all n locations
  Clone ID: LIB3180-031-P2-M2-H12
ttnnnnnnnaaaccgcgaacactatttaattcattcgattattattaaagaaagccccggatacataaatgggaagaccggtgaagggggtatttacaggttctagcctttagctggtcc

SEQ ID NO: 30581 - DNA, 297 bp, Zea mays
  unsure at all n locations
  Clone ID: LIB3180-033-P2-M2-F2
tttttnnnnnnnnnggggggggggttnnttnnttnntttttttttggggtttgtttttttgtttttgtttttgtttttgttttttgtgtttttttgtttttttttttttttttttttttttttttttttttttttttttttttttttttttttttttttttttgtttttttttttttttttttgttttttttttttttttttgtttttttgtttttttttttttttttgttttttttttttgtttttttttttttttgtttttttttttttttttttttgttttttttttttttttt

SEQ ID NO: 30582 - DNA, 173 bp, Zea mays
  unsure at all n locations
  Clone ID: LIB3180-034-P2-M2-D12
tggtnttnattatatagtgggtggggtattattttttatttaaatttttattttttaattaataatttttatatttgtattgggtatttgtatttttaattttattttaatatgtattttattttttttttttaattatattttttttttagattttttattttttatttttt

SEQ ID NO: 30583 - DNA, 175 bp, Zea mays
  unsure at all n locations
  Clone ID: LIB3180-034-P2-M2-F8
gggatctggcggggggaatttgttttanggtttttgtttttctatgattttttatagttttttgtaattattttataattttttgtttgtgtgtttgtggttgttttttttattttattgttttttttttttttttttttttttttttttttttttttttttttttttggttttt

SEQ ID NO: 30584 - DNA, 277 bp, Zea mays
  unsure at all n locations
  Clone ID: LIB3180-034-P2-M2-H3
tttgtgtnnnnnnnnnnnnngggggggggnnnnnnnnnnnnnnnnnnnnnnngnnnnnntgnngnnnnnnnnngngtgtgggtgnnngttnnttttttttgtttttttttgtttttttttttttttttttttttttttttttttttgttttttttttgtttttttttttttttgtttgtttttttttttttttttttttttttttttttttttttttttttttttttttttttttttttttttttttttttttttnttttttttttttttttttttt

SEQ ID NO: 30585 - DNA, 132 bp, Zea mays
  Clone ID: LIB3180-035-P2-M2-C1
atgctgtctagtttttgaacttgcgttgagtcgagaaaacaaaatagaacttgtgtagccgaggggtgaccttttcccttgtgccattcttttccctgtcgtggtgggtggtgggctgtggctgatgcttat

SEQ ID NO: 30586 - DNA, 175 bp, Zea mays
  Clone ID: LIB3180-035-P2-M2-E4
acccgtcctttagccttctaagactgattgaacaattcaagatctaatgctctatgtgtgttgttgctttgaaggaaaaccagtaaaccactgctggattttgtcatgcaaaaaccattagagatactgtggacagcgtgttgcattctggcaatcaaattttttttgcacagtg

SEQ ID NO: 30587 - DNA, 405 bp, Zea mays
  Clone ID: LIB3180-036-P2-M2-B1
cgacccacccgttttttagaaaatttttcctctgattgatagggaactgtacagggactctgatgtgataaccgagtacaaaaattccaaattctttgtaataaagtcctacactgaggaccatgtacataggggcattaagtataaagtttgggccagcacatccagtgggaacatgaaactggattctgcttaccatgcagccaaagagaaagaagagcattgccctattttcttgtttttctcgtttcgccctattcaccccccctctaggcgactatcaacgctgttttctgaatccgtcaagtgcaaaaaaagacatatttgttcctgtctccttaaggtcatcattgagatggctatttaaatttaagtaggaattgaagtatggttgcatttaactta

SEQ ID NO: 30588 - DNA, 358 bp, Zea mays
  Clone ID: LIB3180-036-P2-M2-F12
caaatctaaattgcattttatttctgcaattgatctcatgacagggacgcccacagcgcgccaaatgttccagtatcatatatgcatagacaggtacagtgtctagcagccacaaaggtggtcagcagcagggccaacaaatgaaaaaataaactacaacattgcaggatcatctgcgtcgacatattttattactgcagaattgatcccagcagcactaccggtagttacggtagacaggagtgtacatgcagctctgtgcatatttcaccaggtcccttgggggaggcagacgggtcgccaaaccgagttcataagcttttgcagccacggctgcggcaatgcgcccagagatctt

SEQ ID NO: 30589 - DNA, 240 bp, Zea mays
  unsure at all n locations
  Clone ID: LIB3180-037-E3-F2A
aannattnttttatttttttnnggaaagaagaaaaaatcatggtaactgtttcattgtttatatttaacccaagctttatgccttatgggttcaatcagtatatgtattaaatttataaagtaattgaccacttgctcattgaaaaaattttatatggattggccaacaaaaagaaatcagttaatggatttgtcaatttaaatgtaaacatgggtggtgtattgtgttatcttttactt

SEQ ID NO: 30590 - DNA, 462 bp, Zea mays
  Clone ID: LIB3180-037-E3-R2A
tgacgaagcttaccacacttactgcatggatccaccgcgcagttctgtcccgagaggtaaatggttctgcacgccgtgtagtgcatggaggtcggcgaacgggatgcagaggtatgagaagtcgatcctgcagagcgtcaagcgtgttcttgatgccaaagggcccaaggtgcaggcagcagctgctgctccaggaaaataagcagcggcgctgtggatgtgggggtacaaaaagaaatgaaaggattcttgttcctctgaaggtgtatgcattactctgacagactgaatcgagtaatcggaggatgggctgtgtatacgtggggagaagacctgttggcttgtgaagacggagatggtggcatccgagtggacacgcacttttgtctgtggatggagctgctgatgttggttccctgtcctgctatttccttcctggaattcttctgactaccccaagcg

SEQ ID NO: 30591 - DNA, 282 bp, Zea mays
  Clone ID: LIB3180-037-P2-M2-A1
ttcaaccaacccttttttttttaaatcgcaagcggccgcccttggtttttttttttacagacaatggatttatattatattctaacatttttatatataaaacattatttaaaaaaattaatcacacatacaatctcattccacttgtaaattaagacacgcgtactatatgcacaaagatcacgtgacacttgcaaacatttaacaattttttttacacgaagttacaaacacattcccagcctgtcaggcaaagcatttggaaaggacgcgccaaacaaa

SEQ ID NO: 30592 - DNA, 282 bp, Zea mays
  Clone ID: LIB3180-037-P2-M2-B7
ggggtttcttttttaaaaagggagggacgccttataaagccttataaactgagacggagtgagtatccaccattcctagtaaacgagtccagagttaggataggaaaagagcatgcccatacaagaaatgtgacaacattatcacaccgcacgtttatatgaccttcagaacattaccaaggacaagtgcccactgtgtccaatgtgtccctccctgacaaaagacggcatatggatctttcaagggcccagcacatgacagattgcttttgcttccatcaa

SEQ ID NO: 30593 - DNA, 333 bp, Zea mays
  unsure at all n locations
  Clone ID: LIB3180-037-P2-M2-C1
attatataaacccaattttttttttttttttttttataaaaaaggattttttttttatttttatatttattatttattttttttaatttnttaaaaataaagccaatatttaatattaaaaaccacggttttttaaaattgaaaaaataaaaaaattgaaaatatttaattttttaaaccaaatgagttccccagtttaaaatttaaaaatgggcccaaaaaatgttctcaaaaacttgtaaaaaaatttggaaaattaaatcttgaaattataaatttatatttaaataaaaataaaattactttttttataaacttattttttttaaaact

SEQ ID NO: 30594 - DNA, 306 bp, Zea mays
  Clone ID: LIB3180-037-P2-M2-D1
gcttgaggctgccaacaaggctgtctcgaagattggacagcacatgtctggtggtggctctggcggctcgcagtcaggatctggacctcagggtggcggcgaccaggcgccggaggcagagtatgaggaggttaagaagtgaggctgcgggagttcaagggaattgtagcggcttgtttagaagtagctcgttttttttttgggaacgcagatagtcagatgtctcagatgaggtgtaacctgtgttgcaataatctatgaacttaccccggggggggggagtttttatatttttttattttttat

SEQ ID NO: 30595 - DNA, 338 bp, Zea mays
  Clone ID: LIB3180-037-P2-M2-E12
aaaccattccacatacttctatagagtagaaactgagctgttcctgaacaaattgagctatggaacgtaccataaaacatgggcatcagttgagcattcgaataaattacacaatagtatcagacacaagcctaagagccaaagaaatggaccgccttatgcatacagtatccttaacatgacactgggatcgacaaaactagagaacccaagcacagtggtacagagcgcagattaacctccttaaacttgggcagtgccttgggtgaacttgggatcctcgcacctgtacttcccatcggggccggtaccaaagcctttggggtcggcaaacacgt

SEQ ID NO: 30596 - DNA, 97 bp, Zea mays
  Clone ID: LIB3180-038-P2-M2-A1
gaggggaaggggggctattcaaaatactttattttttaaaagaaatgaatatagatagaagggggataaaaaaaagagtggggggtaaatgtataaa

SEQ ID NO: 30597 - DNA, 258 bp, Zea mays
  Clone ID: LIB3180-038-P2-M2-B5
ggaaaggtaaaaaggattaattttttttaaaaacccgaaggaaatttgggggaataaaaaaattttaaaaaataaggtgttgaaaaaaaaaaaattttttaaaaaaaaaaaaaaaaaaatgattgggggggcaatttttggaaaaaaaggggataaggggagaaaaatggcttaatgttttgtaaaaaaaaaattttttaagtattttaaaactttttggaaattttttgcttaaaaaaaaataaaaaagaatttttt

SEQ ID NO: 30598 - DNA, 315 bp, Zea mays
  Clone ID: LIB3180-038-P2-M2-C1
ttttgttttttgttttttttttttgagtacaaaagcgagactatttccatcagatttgagcttctatcatgttcaaccacgataataaacaaagcttgcaatctctagctgtcacataacaataaagattggtgaacgaaaaagaaaaagagagagagcaagagagtggaaactagaacaaccatgtcccccatatcacaaaatgctctgaccttgttgatagccaaagcaagtttgcaattgccaaaccaccaactttgatctgaactttcaggaaattgtagatattttggccttcatatctaagttctccac

SEQ ID NO: 30599 - DNA, 281 bp, Zea mays
  Clone ID: LIB3180-039-P2-M2-B6
ttggtgtttttttaaaaaaaaagcggaaggaaaaaaaaataaaaaatataaataaaaaaaaattaaataaaaaaattaaaaaaaataaaaaaaaaaaaaaatatattaaaaataataaaattataatatatataaaataaataaaaaaaaataattatataaaaataataaaattaattattaatatatatataataataaaattaataaaaaaataaataaaataataaataaaaaaataaaaaaataaatataaaataaatagaggagataatataatt

SEQ ID NO: 30600 - DNA, 323 bp, Zea mays
  Clone ID: LIB3180-039-P2-M2-G4
ttttgttttttttaaaaaagaggggggaatataaaaaaaatttaatattatataaataaaatataaaaaaaaattataatattaattttttaaaggaaaaaaaaaaaaaaattttaatatttataaataaaaaaataaataaaattttattaaaattaataaaaattattattaatattaaaaaataatattaataaatataaaataaaaatttattaaaataattaaatataaataaaataaaaatattttaaatatgagatgatataatattaataaataaaaatatattttaataaaaaatatataataatatatttata

SEQ ID NO: 30601 - DNA, 65 bp, Zea mays
  unsure at all n locations
  Clone ID: LIB3180-039-P2-M2-H9
ttgtttttttttaaaaaaacgtcggccttttaaattatattttttattttaactanttaatcttt

SEQ ID NO: 30602 - DNA, 311 bp, Zea mays
  Clone ID: LIB3180-040-P2-M2-A12
gactagcgagtaactcatccatgcaacctcataacaatccgttcctttctactgacacttgcgataattaactaaaaaaacccccccacccccgcgaaatacccatcataaccttaatgggctacacatacatgccgacggagagcaaaacacacatgagatccaagtgctatataacgacgatcactaatcagtatcagtccaagccggcaaaaactagtattgacaggaacgttaacgccaggtattcctccaatgcttacgcagccacagccagccacaccttggatgctcacagctaggtcttgacg

SEQ ID NO: 30603 - DNA, 422 bp, Zea mays
  unsure at all n locations
  Clone ID: LIB3180-040-P2-M2-E4
ggtaggattgtacataaaaattccagggaccgaaattccattttagtcaaacaagagtcacgagatgttaccattgacaaaagacaggtaaaatgtaagaattgcaattacacagctcatggcagatgcagttgtcataattccatgggcaagcctcaatgacgtcaccactcgctgtgacaggatcaagaatgacaagctaaaccattcaattcgggttgctttgcaattcacaaagtttctgtcagttcaagagaagattatatttccatcttcagaccttcaaaagatgtttgaaggtcaagttccctgtatagtgccaagaaatttggaaggggacttggaactagcatcattaaaatttgcacgggtcttcaaggctgatagntgatatgaacaagccttgaccatcaagcatttga

SEQ ID NO: 30604 - DNA, 415 bp, Zea mays
  Clone ID: LIB3180-040-P2-M2-G5
ggttgtttttttttattgggctggcatattatttattatctcgctcccaatgtctcgaccatctgtgggcgaaacctagggatcatccttaagatccggactcactacgaaggcgacctagggatggttagtgtttgtccaaacaggcgccaacaagtttattacatagaaaagccttatggtctacagatcacgcaaaaggttagcgcttcaaccagcattaatcattcttcgccttgataaactttttaataatgcccatcatctcacttccagggaatcgtccaaggcagcccctcgcagtggcaatttcgttgaactcacacacagtgtcaccactgaaagctttaagttgatcaggcttgggatcaaatgattttatattgtcaagcaaaattttttcggttttactgaa

SEQ ID NO: 30605 - DNA, 142 bp, Zea mays
  Clone ID: LIB3180-040-P2-M2-H12
gatactaatcggggggccggatacaaacctatacatgagggccaccttgtcggaaaaagaggaccacccactggaaatgctggtatagatggcatacttaacaagctgggcaaagacaaattgcttgtagactttagccaac

SEQ ID NO: 30606 - DNA, 199 bp, Zea mays
  Clone ID: LIB3180-041-P2-M2-A4
gtgcgaacaaaaacctgggtcattcttctctcgactcgtttcatagcgggagcaaccaaagggaacaacaggggtaccaacacctaatccaaaggtagaacggacactaacacggggacagaagcgaacggtaacacgatactatagatagataagataactcggccgaagccaggatgggcccacacattagaccctt

SEQ ID NO: 30607 - DNA, 168 bp, Zea mays
  Clone ID: LIB3180-041-P2-M2-A6
gataggtggaacaaatggaaacatataggggctttacgacgaacgactagaacaagtagagcggagtagagtatttacagatagcaagggattatggtgaatgcaatgcaggtgacattcataataatcatttacatatggtcatttgatgtcataggagattagtta

SEQ ID NO: 30608 - DNA, 88 bp, Zea mays
  Clone ID: LIB3180-041-P2-M2-E7
cgtcaactacggcatgctcatggtgggccgcttcgtggccggagttggcgtgggctacgggggcatgatcgcgcccgtgtacaccgcc

SEQ ID NO: 30609 - DNA, 373 bp, Zea mays
  Clone ID: LIB3180-041-P2-M2-H3
cttaaatatggccggccatcatcaacaaacatacatatgaacataaataattacacattcttgtaatgaccacccccaaatcgaaaacaaagaaaaccccacactacaaatgtacacgcggttcatcgagacgacgacggtccaaagaataacaaattaatgtccatgcatgccaagtgtttgtctgcttttacttaataacttttcactccgggcggctacgcttaagtatcacggcaacttaatttaatttaccagcagcaagcaagcaagcaagcaagggagcgaggagggagagctttgcatgctcgatccgtcaacaggatcacttttcctcaacagcagttgctgcttttgctggcggcgccgcctt

SEQ ID NO: 30610 - DNA, 234 bp, Zea mays
  Clone ID: LIB3180-042-P2-M2-B12
aaaaaaaatttttaataaaaaaattttttttatatttatttttttaaaaaaaaattatttttatattaaacaactttttttttcttttttatctgatttttttttctaataaaaaattttttttttttttctattattaatcttttgttatagtttataaaaataattatttttttattatttatttatttttattatttaatttttttttttattattttattattattattt

SEQ ID NO: 30611 - DNA, 353 bp, Zea mays
  Clone ID: LIB3180-042-P2-M2-C5
tttttgtgtttataatatagggttggttgtgtttaaaacaacaaaaaactttcgttcattatactcattaaacatttacatccacatacctttattcacgataaagttctttaccattaaagcatccatcaacagtttttttaatccacattaggctatctttcttaccatcaatgtaccattatcccttacattaaattttgattaacattcaaatcaatcactctcaataaaaagttacccactccaatcccaagcaaaaaccttattttttttttatttcaataatcacacattctttatactccaattcaaaatctttttatttttaatacacttacatactacaattt

SEQ ID NO: 30612 - DNA, 289 bp, Zea mays
  Clone ID: LIB3180-042-P2-M2-E7
cttgttctgctcggtccagtttatactggggtgcatagccatgggggccatgctcgttcgcttcctgccgccttctccggagattgtacctacttgaggttagagaattaggccaatcagcccagcctttgattaggcattgttgcaatattgttcactgttacttgttaggcatcaatcgccttacaaattttcgtctttgtaccatcaactcgattttgctagtaacttcttatgaatatgaatttactgtacttctggcttttcaaaaaaaaaaaataaaataaaa

SEQ ID NO: 30613 - DNA, 280 bp, Zea mays
  Clone ID: LIB3180-042-P2-M2-F9
agtgtgggcgggcactgaataagacacgatttcttcatctgtttctgcttgttaaaaccagtcccagcttacaccaaggtcttcctttcacttgaaggcgtgataccaagatccctaccgttcaaacctcaaagaatgtgcacggaacatggtgtaaaactaaaagcaaacaaaccaacattttttggcttacttatctcatttaaacctggatctccatctcctcgtctcccgaggctttacaagctttacaggctcatcttggatccggagccaccac

SEQ ID NO: 30614 - DNA, 232 bp, Zea mays
  Clone ID: LIB3180-042-P2-M2-G6
tttttgtttgttttttatttaatgtttgtgtggtttaaaaaaaatcttgatccacaatgattacggggcatatgaaggaaacacaaattttccaattatgtgacaccgggcttgacaactcccaattttccccaacgtgggacgggtggcaggtacaacaaacactttttgaccagcgcgggatctggatttttactccctacttgtgcccacaagtggagcattaagcaac

SEQ ID NO: 30615 - DNA, 473 bp, Zea mays
  Clone ID: LIB3180-042-P2-M2-H2
ttcaaccaacccttcctaaaatccacccaaaccaatcctcactacgaacacgctaccaccaatggctgggaaggttttatccctccttgccctttttgccctttttgcaagcccaccaaatccatccataattccacattcctaacttgctcctagttccattattccaaacttcctcccaccagttccttcaatggccttctaacacccatctgtgcaagcctatatgctacaacaagcgattgcggcgagcgttttacaacaaccaattgcccaattgcaacaacaatccttggcacatttaacaatacaaaccatcgcaacgcatcagcaacaacagttcctaccagcactgagccacctagccatggtgaaccctgtcgcctacttgcaacagcagctgcttgcattccaacccacttgctctagcaaacgtagttgcaaaccagcaacaacaacaactgcaacagttt

SEQ ID NO: 30616 - DNA, 93 bp, Zea mays
  Clone ID: LIB3180-044-P2-M2-B5
tttttttttttagaatgaaaaataaaatttcttttgaagggcagggaacagaacaatctgctacagaactaaaatataactaattactgacag

SEQ ID NO: 30617 - DNA, 387 bp, Zea mays
  Clone ID: LIB3180-044-P2-M2-C6
aagaaagggtgggaaacatgacaccgagcaaagcaatcgtcctcagctgtggggcaatttaccgcacaatataatacaaggaaacagattggtaaacctagattgacatgtgtaaacaataaaaattcgaaattaggcattcacattgactccaagcatgtccatggctctgaaacgtcttattggaaatgagctcattggaaggtgatccaggtgaagaggccatcttccaaacagaaggcacgttagaaaaggtagcctcattagttttgtttgaggccatggaaggaattgctcgcaattgcccatgagcatcaaaatgcgcgttctcaatgtctccatcgtctattctaccattccacgctggttgaagatttcaaacatggg

SEQ ID NO: 30618 - DNA, 495 bp, Zea mays
  Clone ID: LIB3180-044-P2-M2-D1-F2A
gggcgtgcgtctctctcttcctcttctcccgccgcccagcttctctcttctctcggcggcgccaccacggcgatcaagcgcgatacgggcgtaaccgaagaatcgacaatgggcggcgagaaggaaacctttgatacgtccgacctcaaggggggcctccccgcggccgctgcagccctcagcgccgaggaccgcgccggcctcgtcaatgcccttaaggataagctgcagagcctggcgggccagcacgccgatgtgttagagacgctgtcgcccaatgttaggaagcgggttgagtttttgagagagatccagagtcaacacgatgaaattgaggccaagttttttgaagaacgagctgcccttgaggcaaagtaccagaagctttatgaacctttatacacaaagaggtatggaattgtaaatggagaagtggaggtagatggtgtttgtgatgaaccggccagtgagaatactgttgagggaaaagaacca

SEQ ID NO: 30619 - DNA, 480 bp, Zea mays
  Clone ID: LIB3180-044-P2-M2-D1-R2A
acaaccatataatatcatccgattgcacgtagctgaatccccaagacactagcagacaagttgcaaaccaatatccatccaccaacgcagcaccaaagtgctccagacaacaccctcaccggctactaataaaaaccacacttgagatatcaacaccaacatctggcctgcgcacacataacctctaggcagctcaatggaaaatactgcatcaaccaacatcaacaggccattctactgctgcttgcactccgctggttgttccgcatttccctgcgacaccttctgtggcgccttatgtctgcgaccagatcctgacttccttgctggcttgctttcttcctcatcatcctcttcctcatcatcatcctcttcttcatcctcatcatcttcgtcatcgtcttcatcatcatcatcttcatcatcatcgcccaactcaccaaaatcctcaccttgcacagcctcaccagtaaaccagga

SEQ ID NO: 30620 - DNA, 305 bp, Zea mays
  Clone ID: LIB3180-045-P2-M2-B4
aaagaattgaatgaattagatgtctgatgtacaagatctaatggtacaaatgctacaactatgctgcgattaaaatacacgatgtgacagttttcaaggatgtgaattgaacaaagatacatgagccagaggaaacaatgtaataatcaattgtgaaacatagtatgtaccgattttcctgatcatgtgagcatacaatgaattcgttgtgtcagaaaggtttactgtgctagctgttgactctcttgagttggacttttaactttttactcccttaattggattcattcatcacactaatggtt

SEQ ID NO: 30621 - DNA, 275 bp, Zea mays
  Clone ID: LIB3180-045-P2-M2-B6
ggtggtttttttaaaagggtggggggggtttttttttatttttaatgtcccattttattctggtaacagattcccatgctttctttcggccctctgatagaatcagcatatggtcacagaatagacttgaattacaaacagctggacaaaaaatacaagacgcagaattaacatgggacacaaaaaccaatgtattaaatatccttttctaaaaaccatactgccttaaaaaaaaaagactggcggagcttcgggcgcacaaagaaagctttaac

SEQ ID NO: 30622 - DNA, 295 bp, Zea mays
  unsure at all n locations
  Clone ID: LIB3180-045-P2-M2-B8
accggtttcgaccccacttcttatctttcagtctccagactcctgcttcattacgtcctgcgcgctattccgcagcccaggacgcgtgaccgccatcccatcccactctccatagtccccctacctcccccatcccaatcctcatgcttcgccttgccctcgtcaccggcagctagcggctgtcttgtgccactgcacacacanccaggtgtttcgattggagtcacttgccgaagcggaagatgttcctaaatcaagatggacggccgccagaatacttttcacttctacatga

SEQ ID NO: 30623 - DNA, 244 bp, Zea mays
  Clone ID: LIB3180-045-P2-M2-D7
gtgagcctctattttttttataatatttttttttttttattattttttttatgttttttttaattgttttctccttttttttttttgtgttttttattttcttttgtttttttttttttgttgttttttttattttatatttttttttttgttttttattgtttattatttgttttatttaatttttattatttttttctatcttattttttttttttttttttttcttttttattatattttt

SEQ ID NO: 30624 - DNA, 338 bp, Zea mays
  Clone ID: LIB3180-045-P2-M2-G3
ccaaggtgacatattaaatgctgtgttactgcatcatggacaagttgtgctgaaacctactcggaattggttgtggatctttatatggattttaaccttgctcctgaagacaggagccacatggccctaggagactattctcgtttcccagcaaaacggtttaaagataattgaaacattggatctgtatctggggagactattgtttgtttcctatgagccacaaccaaaaagcttggccgttgcatttccccccgagaagaagcgttggagttaatgactcgcaaggtcgtggaaaggagataatatttttcgaggtcattatgtagcttggcatg

SEQ ID NO: 30625 - DNA, 347 bp, Zea mays
  unsure at all n locations
  Clone ID: LIB3180-045-P2-M2-H8
gttgggtcgntctcacgagattgcaaacatgggaacagaatcagggctacaagacaagtcagttgctgcataaatcatacccaaaaaaactagaaccagttcttattttctaccacattcagtcggtacccaaaaaactcccatcgaaccttttattagacaattcacaatatggagactgcactgcaggctgctccaggagacccagtgtccaagtcttcactcccaaaactgtaagaacaaaaataagtgaaggacgcgtctttataactcagcaccgagttccagcatcaaggtgtggttcgagtcatcgtttccagcccacgcgttcgagaccattagcttta

SEQ ID NO: 30626 - DNA, 82 bp, Zea mays
  Clone ID: LIB3180-046-P2-M2-B1
acttaaatgaattaattaaagtttaaatattaataaatttaataaaaaaaagaattttattttttttttaaatattaatata

SEQ ID NO: 30627 - DNA, 91 bp, Zea mays
  Clone ID: LIB3180-046-P2-M2-B12
aacacttgtttcaaaaactctatccgcctcgggagtgggggatgattcagaaagagaggagagtgctaaagacaaaccctgatgagatcga

SEQ ID NO: 30628 - DNA, 373 bp, Zea mays
  Clone ID: LIB3180-046-P2-M2-D3
aaggaatgcatatccataactggaacaaaccattaccatattgttcatacatgttgctcatagtaaaaatctcctcatcttggttcataacaagatggtacagtgggtagtactattctctagtttggtcatggatggcagaatgacggtggctaaatgtacccctctcaacatcctaaccacttaacctgacgtggttcccttcaatgataagagtagcaaaagcaagtgtttcaccaactgtccaatcaatgccttttctagtctcaatcatttgacgcctttgataaaaaaattcacagccctgtgaggattgaaattttggcagagtagtcatggtttcttcaacacgttttagaatctctggcttgac

SEQ ID NO: 30629 - DNA, 266 bp, Zea mays
  Clone ID: LIB3180-046-P2-M2-G3
ggttgggggggtttttggaatccaatccgatcgaacgcaaccaaacctcgaaatggagcaacttttaaactactacaacaagggagaaaaatagcggggcgggagggaagaacgagcgctacagtgcaagatgtactgaagcgtcacggcgactcttgtcactggccgtggccggtggatcagcgcgcggccagctagttgctcttgtacggcggcgggggcgacgcgtaggacacggggtacacgggcgggagcggcggcggggg

SEQ ID NO: 30630 - DNA, 344 bp, Zea mays
  Clone ID: LIB3180-047-G3-F2A
aaagagtgaactgatttgattaaaagtttcacggcgacacatagacctgacataatatatacaatgaattattttccattcaatgggatacacccaacatagttttagacattccgatggaaaaaaatttattctcggatgcacttttttccgatactctttggaagacttttttatgataaactagaccttgagttcttcatcttagttggtgctgatcatgtggcggatcaggttggtccaacttttcatccccgcggattgctagttgtaaatgccacagagtattacgttatgatctttataaggttttttcatttttattttcaaagcaatacttcagc

SEQ ID NO: 30631 - DNA, 295 bp, Zea mays
  Clone ID: LIB3180-047-G3-R2A
ctatctcatgacaaatacatccatacttgcatgctccgatccgcaatattttaacctcatgaccaatatcaagaacggtatcaatgaactcgacatgatcgaaaggctaccatccagagagctcctgcatagagaccatgatgagctcgattgcgataacgaccacatcatcagcaccgactacatgacctacatactcacgaacgacactgtgcacggacagagctagcaccataaagtcaatgtgaacgactccataacccttatatttgatgacaaggaagctgctagtttt

SEQ ID NO: 30632 - DNA, 236 bp, Zea mays
  Clone ID: LIB3180-047-P2-B2
gcactcacaatggcgttatttccaatttaaatttagacttttgatcagattttattcagaacgagcttgagtgtcacgttatgacgacgtgaccaccttgagctcgaactcctaggcagcgaccagcgacaacccctccacttgagcggcgcctagtgctccgcgcctttgataccctagcgtctcgccagtcgagttgtccatcttaacgcccgtggcatacacgtggatctttc

SEQ ID NO: 30633 - DNA, 191 bp, Zea mays
  Clone ID: LIB3180-047-P2-C10
gggggcgcgtgcatgctacgggacagacatgtaataatgaatcgaatccaaaaaaaaagagccttgatcaacaaacacaacaccattggcccgacatgaaaactattcgataccaaaatgtggaataaggttccatatccggacctattgacccaccatagacaattaggcagtagcaactgcaaacaagc

SEQ ID NO: 30634 - DNA, 569 bp, Zea mays
  unsure at all n locations
  Clone ID: LIB3180-047-P2-F1-F2A
agcaacatgaataatccccaaaaccctaaagccagtgctccttgcaccttgccatcggagcttcccaaagaagcagtggcgaccgacgaagcaccgccgccaatgggcaacaacaacaacaacacggaatcagcgacggcgacgatggtccgagagcaggaccggctgatgcccgtggccaacgtgtcccgcatcatgcgccaagtgctgcctccgtacgccaagatctccgacgacgccaaggaggtgatccaggagtgcgtgtcggagttcatcagcttcgtcaccggcgaggcgaacgagcggtgccacaccgagcgccgcaagaccgtcacctccgaggacatcgtgtgggccatgagccgcctcggcttcgacgactacgtcgcgcccctcggcgccttcctccagcgcatgcgcgacgacagcgaccacggcggtgaagagcgcggcggccctgcanggcgtggtggctcgcgccgcggctcgtcntccttgccgctccactgcccgcagcagatgcaccacctgcacccagccctctggcggggtccgcaccagagcgtgta

SEQ ID NO: 30635 - DNA, 430 bp, Zea mays
  Clone ID: LIB3180-047-P2-F1-R2A
ggccacaggggaaaaaaaattttgggacccccccaacagggggttggttaaaaaggggggaaaaaacaaccgggccccccggttaaaaccattcccaccacaacggggacttccgggaggggggggccccggccccaaataccctagggttgttgggttaaaaaccaaaatggggaataggccccggcccaacccaaggggggggggcccaaaccccccttttttttttccccggggaactgaaaaacttgctaaatttgttggagccaaaaaaaccccccctggggggggggttttaacttaaaaagcttgccccgccggcggggaatccaaaaaccggtgggggtcaaccggccgggagaagcccctttttttagcccaagggggcccccccccccaacccggggggggcctcccccctgatggggga

SEQ ID NO: 30636 - DNA, 175 bp, Zea mays
  Clone ID: LIB3180-048-P2-A3
ggaggagaaatggcacaagatgttctcattaccaagacattacaaactaaacttcaggcatttgctagataatgttttgtacaattttactgtgggaatgctaattattgcggcatagttgtattttcactaagaaaccacagtttgaattatcgccttactatttgtgacgtgt

SEQ ID NO: 30637 - DNA, 104 bp, Zea mays
  Clone ID: LIB3180-048-P2-B3
tttatttgtttcccacgacacaaagggcggaaattgcatacgtttcaaaaaagaatctaattaaagacaatatgggctggataatataaatttgggcttacata

SEQ ID NO: 30638 - DNA, 385 bp, Zea mays
  Clone ID: LIB3180-048-P2-B5
gaacaagggcaataggttcccaaacatggtatacattataattagcacttgttgtcaacaaaacgtatctatacatgatacaaatacataatatgtcggacacaaacgaagtataccttacccttgcccatctagaagaatcgataacgaccgcttggcgttttgtgtataccattgccatctcatgaatagagcacagcatgatttttggcacagctagaaaagaatagtacgaaagtacgtatcaacttttggactgtgtgttgtcactgcttgggatgcccgcggcaagccgcgctcttaggtccttcctaagaatcttgccggagggattcttcgggatagaatccgtgaagaaaactttgttgatccttttgtagaacac

SEQ ID NO: 30639 - DNA, 205 bp, Zea mays
  Clone ID: LIB3180-048-P2-E3
tttggttgttttttttagagggtgggggggtcttatatttgttatattatttatagaacaaacattttttggaactaaaccatacctgcatttttttcaggcacaaatcctagtgccccagaaatatgtctaaactgggctagtaccatttccaaattaaactatacctactaaaacccgagaatatacaaaccacctctaataa

SEQ ID NO: 30640 - DNA, 87 bp, Zea mays
  Clone ID: LIB3180-048-P2-F7
agggcgggggatataaaaataaaaataatttttataatataattatattttatttataatatttaaaaaaatttttaattattatat

SEQ ID NO: 30641 - DNA, 362 bp, Zea mays
  Clone ID: LIB3180-049-P2-M1-B3
gcttacaacaatctgctcatttttttcctggcaaatcactcggtgtatcaaaaactttagagctatgtagttgaaagactaatcaacacgcagtttaaccatgagcaagctttgtttaattattacagtctacgagtacttattcaggcagatcactctgaggttgtgcctactgttgggcgctgccagcttgaccttgttggtagctgccactgccagcaggagtaagcacagccagctcatgcttcctaccgttcttgagctctgcagcttcctccatggagatggcatacgagctggcgatgacggcggccggcaagtcgctcaggacggagttcttcccggcgacgtggctgaccatg

SEQ ID NO: 30642 - DNA, 148 bp, Zea mays
  Clone ID: LIB3180-049-P2-M1-E11
attctgtgggagtctcagactcttgtctcctctatttatggaacagcctttcaaaaaaaaacatcgatctgcgcgcggcagcgcagagttcgatcattttcactctttagtacgcttcgtttattctaaacacacatgactttattta

SEQ ID NO: 30643 - DNA, 313 bp, Zea mays
  Clone ID: LIB3180-049-P2-M1-H9
cggcaaaaaaaaaaatccttcgacgccaacagcaatagccacatgagctcataccaccacaacagcaagaactagccaatgatcaaaaagattcagatacggttggcagctcgatagaaccgacgaagggacaaaaatcctgtatagccaccgtaccagagaccgttgcccacacaacaaggtaaaggaggacactgctcacgggcagcgcaagcaccctgaaatccaggtgagggaccccaagaccctcttctttggcgagaaagaagttgctgaacttggctgaaagaaccctgatgagtacccatggggt

SEQ ID NO: 30644 - DNA, 75 bp, Zea mays
  Clone ID: LIB3180-050-P2-M1-G2
aaaagaagaccgggggcacccttatcctaattcaatggactcttataaacaacacaacggttgttctttataatc

SEQ ID NO: 30645 - DNA, 317 bp, Zea mays
  Clone ID: LIB3180-050-P2-M1-H12
agaaaaaaattaaaatttttttgtaatttttatttaatatttataattttattagaattttaaatttttttgtattaattaaatttttattttttttttattttttttttatttattattaatttattaatatttttaatattataattttttatttttaaatatttattatttttaattttattttatattttattattttttatttttattttttatattttattatttattttttttatttatttttttatttttttattttttatttttttattttttatttaatatttttatttttttttttttttattttt

SEQ ID NO: 30646 - DNA, 287 bp, Zea mays
  Clone ID: LIB3180-051-P2-M1-C7
agagtgaactgatttgattaaaagtttcacggcgacacatagacctgacaaaatatgagccattaatgctcaaccaaccactaggatacacccaacatagtttcagacattccgatggaaaaaaatttattctcggaagcacttttctccgggggggaagaagacaactcgctcgtatcaccagaccttgagttcttcatcttagttggagctggtcatgtggcggatcaggtcgaccacgcgggtgctgtattcccactcgttgtcgttccagtacacgagcttta

SEQ ID NO: 30647 - DNA, 210 bp, Zea mays
  Clone ID: LIB3180-051-P2-M1-D8
aaaataatgaaatactcgtcacatatgccatggctggcatatcaagcagtgcaggtgaacaaagtctttgtgggagcatacagcatgctacgcacgaaagtactactacataccgcataacttgagcaaatacaacaagcaaaccataggcaagccccggaatgaaaggaaacaagggttcaaatgtggcagggcccaaaccacccttac

SEQ ID NO: 30648 - DNA, 206 bp, Zea mays
  unsure at all n locations
  Clone ID: LIB3180-051-P2-M1-E10
gtgtggnntnnnnnnngggcaaaccaaaatagaatgcaggtaacatatgacactaatttaaagttgatgttgtgacaatcaactcataaagaagaacaaaaaaattaagaggatcttccaatcttgtacatattggaaaaaatcaaacagatgtcactataagtttttaactaaataagtttggaccaaaaacctatcaaaatatg

SEQ ID NO: 30649 - DNA, 76 bp, Zea mays
  Clone ID: LIB3180-051-P2-M1-F10
caaaaaaatgatcgcattgggcgcataaattatcaacatgaacaaaggtggtccacgggtagagcaactttttggg

SEQ ID NO: 30650 - DNA, 209 bp, Zea mays
  unsure at all n locations
  Clone ID: LIB3180-051-P2-M1-G6
gaaccaggggcgacccacgcgcccgttctcactcgcgccgagcgggatcgggggggggcgctggggcggggagggggggcgccgccagcccgcccaacttccataccaaaccgcggctctcttagatctccggtcgccgaccgcacgacggtctcatggccaggcacgacgccatntgcaaggccggacggcagagatcggcaaacgcc

SEQ ID NO: 30651 - DNA, 311 bp, Zea mays
  Clone ID: LIB3180-051-P2-M1-G7
gggtggggggggccttcaaaaatatagggtattttagaggcgaccgaaacatatcatatcccccaagttttacacaatcgcgaaattacaaataaatacattatcgcacacacgtatattaaatatcggaaatttgagaatatgacgagcttaccctcgtccgtcgccggttgtgcagaccccacgggtcaggttgaagaatattgtattgatcgaccggtgctagttgttacacggaccttcgtagggactcaccacctccggttcagtttgtggttttagagaatattcattggttttaaatttttacc

SEQ ID NO: 30652 - DNA, 250 bp, Zea mays
  Clone ID: LIB3180-052-P2-M1-G10
caagaatcaacaacagatttaaagatgcagacttgcggagtaaattgtaagccacaaaatatgttcaccaaacaacttataaaaaagagtctaggctcctgccggattggcgttttcttctacatcaagcacgacatcagctttcttcagaagagcctgaacaggcaggtgtgagtttttaacagccttggttattgcttgccatttttcgccatgctttggttctgctgcaacacatctttggagaaca

SEQ ID NO: 30653 - DNA, 276 bp, Zea mays
  unsure at all n locations
  Clone ID: LIB3180-052-P2-M1-G5
tttgtttttttcaagaatcaacagcggatttaaagatgcagacttgcggagtaaattgtaagccacaaaatatgttcaccaaacaacttataaaaaagagtctaggctcctgccggatnnngagctngttntacataaagaacgacatcatatttctcgagacaagccttaccaggtaatgtttgacacttaacacgnacagtttttgctccattttgtcttggtgtatttcttcattacccttcttttttgtgagaaagaggttgctgtgttttg

SEQ ID NO: 30654 - DNA, 355 bp, Zea mays
  Clone ID: LIB3180-052-P2-M1-H8
gcatcaggaataggctcagagctggttgcattattgtagggcaaacccatgcttcacaatattcagcaaatcacataacggtggtttacaacaaggcagtcacaaaaaaaccatggtaaataagtttccccctgcttctctctgatggaaaggagatatagatctcagatcatattcatcaaagtgccttgtcaaacagacaaaaaaccttctatggtctatcaccaagctcagctctcaagttgccgtacgggtagactctgggagtatatggtatattggaggccttgtcgttcacaacagcagccataccgagggcagcgaagaaccctagccctccgtacaggcacgccaa

SEQ ID NO: 30655 - DNA, 308 bp, Zea mays
  Clone ID: LIB3180-052-P2-M1-H9
ggaaagataagattttttttggggagcaatttatgcaacatgccatcctgcattataattattacaaaagcgacaaacacctccaatcacacgtgaaggtggggccgagggtgagagagaagtcttattagaaggaaggaggaaaatgacgaaattaagaaataatgggacactctgttacgtccactcatcatatatccaacaacgcccgccggccggtcagattacatatttgtccagactcgatgttgttttttttacaccagtgattattatttttgttgcctatttttccattatatttatct

SEQ ID NO: 30656 - DNA, 318 bp, Zea mays
  unsure at all n locations
  Clone ID: LIB3180-053-P2-M1-D4
gtagggttnattttnaaaaggggggtgggggatctatatttaattttattatatattttttttaattaatggtttaattttattttttatgtttttttttttttttattttttatatttttattttttttttattttcatttgtgtggtttttgttgatttttattttaatttttttttttttttatgtttttatgtattttatttttatttttttttgtttttctttatttttttattttttttttttttttttttttttttgtttaatttttttttttttttattatttttattttttttttattatttttttttt

SEQ ID NO: 30657 - DNA, 226 bp, Zea mays
  Clone ID: LIB3180-053-P2-M1-F7
gttcagccaagacgggtatcgcttcgcatcattgatatgataactatagttattacgaagtggcgaaccaaacaccaacataaaacttatagctaatgaaaacaaggagctatcaaaggaaggattataactaactacagtattaatttattctactactagcacataggatcagacagcagcgctgaaacaccgacagccagctcaagcaataacaatcccgcga

SEQ ID NO: 30658 - DNA, 269 bp, Zea mays
  Clone ID: LIB3180-053-P2-M1-H2
ctaggaggccaggatacatcagccaaaaaacttcattattgaatgacaactaataagcaatctaaaagagggcaccgccaatgatgtgttgttggtagaaggctgctgggtttgtcaaagcaagttggacaaagggcagcaactgttgcagttgtaaaagggttgcggggttagccacaaactgctggtagaacggaagcaattgttgttgtgtcaagaaggaagcggggcttgttgtagctagctggccaaatggtagtagtaatttg

SEQ ID NO: 30659 - DNA, 294 bp, Zea mays
  unsure at all n locations
  Clone ID: LIB3180-054-P2-M1-E7
gncgnngngtggggggggttttttttttntttnttttttttgtttttttgtttttttttttttgtttgtttttttgttttttttggttttttttgtttgtttttttttttttttttgttttttttggttttgttttttttnttttttttttttttttttttttttttttttttgttttttttttgttttttttttttttttttttttttttttttttttttttttgttttttttttttttttttttttgtttgttttttttttttggttttttgttttttgttgtgttgttttt

SEQ ID NO: 30660 - DNA, 272 bp, Zea mays
  Clone ID: LIB3180-054-P2-M1-F8
ggagagagcctctcgctaagcattagcattcactgttaccccagtaaaggtctgtttgtgaacaaatggaagggaggagattcaagagttataatttcttactatttaaaaatatataataagagattttagaccaatcaatctcctaaatgtcggacgaacgagcgcggcggccattggtttcacttgcaggcttgcagctgcttgcttttatcagagctcggtgtgcaagacggcgtcgtccttcccctggttcctcgtcgtcgtcgtcg

SEQ ID NO: 30661 - DNA, 291 bp, Zea mays
  unsure at all n locations
  Clone ID: LIB3180-055-A2-F2A
gaaggccagaacacgagaaactttttttttccccacaagtttttcagaggggggaaaatccctcattaggttaatgggaaaaaaaaaaagaattccatagtgcatattctaattttacttnatgcccgagatggggagccttataattttaaaattcataatttgccccaaaaaaccaatggccaccacattttaatttttttccgtttcccaacttaagcccttaaattatgggggggggtttgtccttatctttggggtggccctttttaggaccggttatattgggtt

SEQ ID NO: 30662 - DNA, 437 bp, Zea mays
  Clone ID: LIB3180-055-A2-R2A
cgagatcgaccaaagcgtcgacgcctcctcgatggccatctcggcctccatggagaatgctgcgggcgcggtggcgggggcaagtggcgccggcggtggcagcgggagaggcaagaagaaagggatgccggccaagaacctcatggcggagcgccggcgtcgcaagaagctcaatgaccgcctctacatgctgcgctcggtggtgccgaagatcagcaagatggatagggcttctatccttggcgacgcaattgagtatctgaaggagctcctgcagaggatcagcgatcttcacaatgaacttgagtcagctccgagctcttcgctggttggaccaacatcagctagcttcaacccatcaacaccgacattgcagacatttcctggccaggtcaaggaagaactttgcccgggctcattcccaagccctactggac

SEQ ID NO: 30663 - DNA, 190 bp, Zea mays
  Clone ID: LIB3180-055-P2-M1-C7
aggtggggaatataataataaccgaatgaaatgaaagttgctggtacatcaagtctcgactggtattacatgaatgcaggtgtatgatgtgcgtatgccattcagacattcacagtcggcgatgttcctgtccgagcatacatggatcaatcataggatagctatataggctatagctagttcttattaa

SEQ ID NO: 30664 - DNA, 124 bp, Zea mays
  Clone ID: LIB3180-057-P2-M1-A2
gaaaaaaaaggcaaatccaggtagacatgcagtttagccataacaaacatgttttgcttacaacaatctgctcatttttttcctggcaaatcactcggagtatcaaaaacttaagagctatgta

SEQ ID NO: 30665 - DNA, 275 bp, Zea mays
  Clone ID: LIB3180-057-P2-M1-F1
acgtaggctcagcgcaggcagcatccacaggctggattcaccacaccagcaccacccagcaccgatggccggcgacgacggacgtgctccctccggcctccgagtcgtgatgttccccttcccgttctggagccacattaaccagatgctccagctcgggaagcttctacgtgcgcggggtctgggcgtaaccatgcttcacaccgacttcaacgtttccgtcctcgcattatacccggtcattactctatgtgtccattcgcgagctccttccc

SEQ ID NO: 30666 - DNA, 184 bp, Zea mays
  Clone ID: LIB3180-058-P2-M1-C11
gttttttttttcattttgggggggttttttaatttaatttttttttttttattttaattttgttttgttttttacattgtttttttttttattttttttatttaattttttttttgagtttattttttattttttttttgttttttttttttttttattttttttttttttttatttttttttt

SEQ ID NO: 30667 - DNA, 104 bp, Zea mays
  unsure at all n locations
  Clone ID: LIB3180-058-P2-M1-F9
ttttggggggggtttaacanaatgggggggggtttaaatacatatttcttttatcctttttttaatatttatattttttatttatttttttcattttttttttt

SEQ ID NO: 30668 - DNA, 378 bp, Zea mays
  Clone ID: LIB3180-059-P2-M1-D12
ggtaggacgtacaagccgtgtatgattcatgatagcaagccttcacaaaaaaaggaaacccccaatgtcaaaaggcattgcagaattacagcagtacacaaggctgcctgtgatggcactcttacagttaggctacatgtttctagcgtagcattttgttcagaagctgtacttaatagtaaaactagcaatcaagacgggaaaaaactgctgggaaaattcgttgtgcaatcaagcttcctgtgcaattaaactaccaaaagtcatgaaaaatctaaaaaaaccatagatatagatattttattatctgctctaccaatatatcaaaatttaaattctaacttatcctcgtcaagggaaataaaaaagagaaaaatt

SEQ ID NO: 30669 - DNA, 202 bp, Zea mays
  Clone ID: LIB3180-059-P2-M1-G1
aaggaggaggagagaagagagttattgcataatgtcgatcgatctacacccagcgcaacagccagattattgaagcaaacatggacataagttgaagacggtaagagtgcatgcatgaaacattaattctactcatgatcgaccactacacacaacaattgatcacgcatgcaagctgtttttttttattcaaaagattccc

SEQ ID NO: 30670 - DNA, 287 bp, Zea mays
  Clone ID: LIB3180-059-P2-M1-H11
actcggcatttccgagcccagacccatctcgtttcgctcgccaagagatactatggttagggaaggcaatagcagaagcaaaaaaagaaaggtcttagtgcccatggggagctcacggttctcgtggacgctttcggaccaccccaagctgcccaaggggaaaccggtggctgtcgtcgtgctggacagatggagccaggccataccccaccagatcaactgcattcatgtcgctcagactcctgtcatggactcgctaaagaatggcgctcctgagaaatggagac

SEQ ID NO: 30671 - DNA, 117 bp, Zea mays
  Clone ID: LIB3180-059-P2-M1-H3
ttttgtgtgatttttttgaagacaggggagcctaccatcatttttttcctttactattagttttcctcattcttaccatttcttaaatccttactctcctttcttcaataattctct

SEQ ID NO: 30672 - DNA, 330 bp, Zea mays
  Clone ID: LIB3180-060-P2-M1-B12
gcactaaaaattatattttcattcattcattcaggaaaaaaatcccaactccaaactcgtcacaaattttatcaaggcatagaggaaccatgcgcggcgtccgtgagcaatcatcatagggcgcagcgcgtgtgcttgaacctgagccaccggtccctgaggtcgaactcccagaggtggtcctgctgcaggatgttgccgatgaccgacaccccgggccacgcgccctcctgcacgccgatgcacttcaccccgggcgccgcgtcgacgacgtagctcttggccggcggctgcaggcgcgcggacccggcgaagcgcaccttcagcccg

SEQ ID NO: 30673 - DNA, 143 bp, Zea mays
  Clone ID: LIB3180-060-P2-M1-D11
gtttttttttttaaaaaaaggggggggaactaactattttccatatactactatgagcagttataagaactatgagaccctacacctaggaaccatttttaccaaaacatctcaaactcatcacttctcacctaatcaacttt

SEQ ID NO: 30674 - DNA, 515 bp, Zea mays
  Clone ID: LIB3180-060-P2-M1-H6-F2A
gtaacctttcaataggcgtcccccaagaactagtaaacatggcaaaactgttgagcctgttcttagccctctcctttgtagcagctatgtttgccataggctctcatgctgatggagactgtgagaatgacctccaaagcctgataagtgactgcaagacatacgtgatgttcccagctaatccaaaggtccctccttcggatgcttgctgtggtgtcatcaagaaggcaaacgtttcttgcttgtgctccaaggtcaccaaagaaactgagaaggttgtgtgcatggagaaggttgtgtatgttgctgagcagtgtaagaggccatttgagcatggctttcagtgcggaagctacaaggttccagcaaactgatgataccataagagggaagcgtttggcgtagtctttagatttcaattgttgcagccgatcaaccttcttagggttgtataatatgaagtcaatgttgagactaatgtgaggtgggagaggcctattgatgcatcaaaagta

SEQ ID NO: 30675 - DNA, 302 bp, Zea mays
  unsure at all n locations
  Clone ID: LIB3180-060-P2-M1-H6-R2A
ggaaaaaaaaaaaaaaggggggaaaaggttttttttttaaaaaaaaatttttttaaaaaaaaaaaaaggtttttaaaaaaaaaattatttaaaaaattgattttatttttaaaaaanttaaaaaggttgttgggtttaaaaaattaaaattaaaaaattngggaaaaagttttttttttttggataaaaaaaatgggggaaaattttaaattttnaaaataaaaaaaattttaaaaagggtttttaaatttttaaaaaaaaaaaaaaaattttttaaaagaaaaaaaatttaaaattttttt

SEQ ID NO: 30676 - DNA, 361 bp, Zea mays
  Clone ID: LIB3180-061-P2-M1-A11
ttgttttttttttattttgtttgtttttttttttttttttttttttttttttttttttttttttttttttttttttttttttttttttttttttttttttttttttttttttaaaaaaaaaaaaaattttaaaaataaaaccaaacattttttttttaaaagtttcccccggaaaattttttttttttttttaaaaaaaaaatttaaaccccccttttaaaccttggtttaaaaaaaaaaaggccaaaatttttttaaaattcccaaaaaaaaaaaaaaatttttgagaaaagtttttataattttttttttttaccccttttttcaaaaaaggccttccattgaaaaaaaaaaatttcaa

SEQ ID NO: 30677 - DNA, 265 bp, Zea mays
  Clone ID: LIB3180-061-P2-M1-C12
ttttgggttttggacttcgaaatgcacgaatgggttaagacaatggtacgacaacagaagcgaaagaagacaaagtccaaattattccaaaaccacggcaaactgcccattcatcgaactataaagtttcttttctgtcatttttattccaggagctgtggcctgggtgggggcaggggcatacggcaacggcgacggcgcctagactgctggaccgagagggaggcggcttgcccgcctagaggttgaacatgacttttatggc

SEQ ID NO: 30678 - DNA, 373 bp, Zea mays
  Clone ID: LIB3180-061-P2-M1-D7
ggttggtttttttgaactttaagggggatttctcattaccaatgctcagctaaaattctaactttccagggctcagtggagcacttatgtttccaaacagattcacaagaaatgtacaagtggactgaacttttgggaaggccagtgtggttgtaaaatgagtactcttgtaaaagcagatgcattcttgcttaatctccattgcccagagtgttgtcgcttattcagcctctatgtctaatattctcctcaaatattccaattgttcaaactcaccttgtaggttctcccactcttgaagagacaacgaaactaacttccacccagaagcagtaatgtagcgtcgtttaaatgctgtgtggcctaatggtgt

SEQ ID NO: 30679 - DNA, 198 bp, Zea mays
  unsure at all n locations
  Clone ID: LIB3180-062-P2-M1-A8
gaagggannatttttagagggattattatattaaagtgtaaatattgtttaaaaatatgtttattatttttttttttgtgtataatataaaaattttgttataaatttgttttttttttattgagagaatttttttttttttattagtgttaaattaatattattttttttttttttttnntttattattttttattt

SEQ ID NO: 30680 - DNA, 277 bp, Zea mays
  unsure at all n locations
  Clone ID: LIB3180-062-P2-M1-B9
atgttgaatgttttttttattgtatgttttatataatttttgttctatttttctttaatttatttcttttggttcgtatttagtactggcttttttttttatatttctttaatattattttttttttttgatggtttttctttttattatttattttttttcaatattattttttttttaattatttttattttnttttaaattaattttattttgtaataatattttttattttttttagtttttcttatattttttattattttccttttttttt

SEQ ID NO: 30681 - DNA, 185 bp, Zea mays
  unsure at all n locations
  Clone ID: LIB3180-062-P2-M1-F2
ataatgaatggtgagggttggatttatngaacaaaataaatataaaatggtctcacgatgagtcattcatatagcaagggattcctcaaataataacaccacataaaagtttgaaggaacccttactgcatgccatcatgctagttagctatctttatcaattgaaagcatgcggactattgact

SEQ ID NO: 30682 - DNA, 310 bp, Zea mays
  Clone ID: LIB3180-062-P2-M1-G10
cgctgagcatcgacatgatatggttggacagaggacagaacatcaaaaccatctatgcgttgttattttgaagctggagaaaaactaatcctgaacattaggcagtttaattaggagggcgaaggggggagtgcaagaaaaacgcaacattcgctcacagttttagtaattacaaggggtgttaattggacatccccaattctgttctgcgacttcctgcctccttagtccttcctgcagatcgttatatgtttctttgttcctctccccgtcctagattttcttttcatctaaggtttggtgatgttga

SEQ ID NO: 30683 - DNA, 269 bp, Zea mays
  Clone ID: LIB3180-062-P2-M1-G5
ggaaggagggggggagaagagagtaatagcataatgtcgatcgatctacacccagcgcaacagccagattattgaagcaaacaaggacataagtagaagacggttagagtgcatgcatgaaacattaattctactcatgatcgaccacgacacactacaatttagcacacgtcccagccgccttttttaatcaacttgactgcacctggtacgtacgacgactacgttctgctgctcctgcatgcatgtatttctttactcacgactgt

SEQ ID NO: 30684 - DNA, 604 bp, Zea mays
  Clone ID: LIB3180-047-G3-R1B
cgatctcgtttcaaatccatccatcctcgtttcctccgtcccgcagcatctcaaccccatggccaagatcaagatcgggatcaatgggttcggcaggatcggaaggctggtggccagggtggccctgcagagtgacgatgtcgagctcgtcgccgtgaacgaccccttcatcagcaccgactacatgacctacatgttcaagtacgacactgtgcacggacagtggaagcaccatgaagtcaaggtgaaggactccaaaacccttctctttggtgagaaggaggttgctgtgtttggctgcaggaaccctgaggagatcccgtggggttcggttggtgctgaatatgttgttgagtctactggtgttttcactgaccaggagaaggctgcagctcacttgaagggtggtgccaagaaggttgtcatctctgctcctagcaaggatgcccccatgtttgtcgttggtgtcaacgagaaggagtacaagtctgacattaacattgtctccaatgctagctgcacaaccaactgccttgctcctcttgctaaggtcatcaatgacaagttcggtatcgttgagggtctgatgaccactgtccatgcc

SEQ ID NO: 30685 - DNA, 688 bp, Zea mays
  Clone ID: LIB3180-017-D8-R3A
ttccagtaccatctcggcattctacttattccacgtcgacttcctcatcatcagcctcgtactgctcgtaagtattaaccaccggtggtggttgtgggggcataacaggcgacctagtttcgtcatcagcatcattttctattgatgtgtcacgtctatcctccagttcaacagcttcaaacagatcgtctaaagcatgagcagccataccagtggagggcaaaacatgtttgaccggagattctttgaccttgtcggtgttggctgaggagacaaagttgcctatcttatccttttcatcttcccacagtttcttcttcaaatataaagattttgttggctcggttcccttgcttagtttttcaaatcctgcaatagtaccttcaaacctatatttatctggcctagttgtgtcagagtcccgctctcttcttttcttcacggctttcgcttcttcacttgttgagtatggtattgatctcttcttagctatagcagcatttgggctcctttcataaggaacatttggatcttcatcaacattgatactagaaacttcttcattagcaccacgtttcagaatatctgaagcaagtaaatcaccgagtctctcaaaacgagcttgtgaccttttcaattcttcctgtgctttcaaaaagcgagcatgggcttttagggaactttttaa

SEQ ID NO: 30686 - DNA, 586 bp, Zea mays
  unsure at all n locations
  Clone ID: LIB3180-030-G3-R3B
ggcgcttacaacaagcccgtgccggagctcaagcgcctgtagatgacttccctgttcgcccgnctccgtgactaagggtcgcacgtcgtttgtgcttgcctctgcgcgcacggctttacgagcggaggtgtcggtcagcctggtcgcgaacagctcgagcgccagcaggtcgccagccctgtctgacgccggttcctactagcgtggctacggcggcggctcgctggcctacttggtggaccgtgaggacagctgcgcgtcgccaaggacgagagcgccatgtaccaaggtgctctgtcatgcacacgaagtgtcgcgtctaggatcgggagcttcagtcgtgaagctgttcggaaacatggtcgtcgtggtgaaagtgaaagaccttttaacggacacttcgcctgctagcgttgctcttgcatcccgaatctgtagctctccttacttttccccttgagcgtgctcgttgaaaccgtgtcctggcctcacgtgcctcgtnccccggcgggactgtttttcggggcaacccgtcgtgagccccccgtgcgcgtggtcttcttcccccaagcttctgcggcttctg

SEQ ID NO: 30687 - DNA, 441 bp, Zea mays
  Clone ID: LIB3180-037-E3-F2B
gaaagaaaaaaaaacctggggacgcctcattgtttaaatttcacccaagctttttgccttatgggttcaatcagatttgtaataaacttatacagacattgcccccatgccttgcagaaaagtttttttgggttgtccaacaaaaagaaaacgggtaacggacatgtccatttcaatgtcaacaggggcgggggtcagggttcccacttagcatcagggaagggggagaccctactttacagaacaacaacaacaacaacctacttgtttggggtagtcagaagaattccgggaaggaaatagcgggacggggaaccaacattaggcgttccatccacagacaaaagggcgtgtccactcggatgccaccatctccgtttttacaagccaacaggttttctccccacgtttacacagcccatcctccgattactcgattca

SEQ ID NO: 30688 - DNA, 542 bp, Zea mays
  unsure at all n locations
  Clone ID: LIB3180-047-G3-F3A
gctcaaccaaccactaggatacgcccaacatagtttcagacattccgatggaaaaaaatttattctcggaagcacttttctccgggggggaagaagacaaggcgctcgaatcaccagaccttgagttcttcatcttagttggtgctgttcatgtggcggatcaggtcgaccacgcgggtgctgtatccccactcgatgtccgaccaggacacgagcttcacgaagttgccgttcaaggcaatgccagccttagcatcaaagatgctagacctgctgtcaccctggaaatcggtggaaacaaggtcctcctcaacgtaacccaggatgcccttgaggctaccttctgcctcggccttgaccgcagccttgatctcatcataggttgctgacttctcaagcctaacagtcaaatcaacaacagaaacatcgaccgttgggacacggaaagacattccagtcaactttccgttaaggacaggaagcactttgcccacagccttancagctccagtgctgctgggaatgatgttgaaactagcagc

SEQ ID NO: 30689 - DNA, 519 bp, Zea mays
  Clone ID: LIB3180-047-G3-R2B
cgatctcgtttcaaatccatccatcctcgtttcctccgtcccgcagcatctcaaccccatggcccagatcaagatcgggatcaatgggttcggcaggatcggaaggctggtggccagggtggccctgcagagtgacgatgtcgagctcgtcgccgtgaacgaccccttcatcagcaccgactacatgacctacatgttcacgtacgacactgtgcacggacagtggaagcaccatgaagtcaaggtgaaggactccaaaacccttctctttggtgagaaggaggttgctgtgtttggctgcaggaaccctgaggagatcccgtggggttcggttggtgctgaatatgttgttgagtctactggtgttttcactgaccaggagaaggctgcagctcacttgaagggtggtgccaagaaggctgtcatctctgctcctagcaaggatgcccccatgtttgtcgttggtgtcaacgagaaggagtacaagtctgacattaacattgtctccaatgctagctg

SEQ ID NO: 30690 - DNA, 521 bp, Zea mays
  unsure at all n locations
  Clone ID: LIB3180-055-A2-F3A
gagggaagggcatgcagtcaatatccacatgttctgtgcgcgtaggccaggcatcctgctgtcgacaatgacggccctcgacagcctaggcctcgacatcgagcaggcggtcatcagctgcttcaatggctttgcgatggacgtgttccgagctgagtgcgcggatggtcctggaatggtgcctgaagaaattaaggccgtgctgatgcacaccgccggcctccacaacgcaatgtagccggtccgaaaacgggccaccgccaggatgacgacgatcctcctcctttctactaagggcttcggttcggaagcggcataagattaagctgtggtggccattggttttctggggcaagtgatgaattttaagatgatgaggctcgccatctcgggcatgaggcatgagtgatgatgtaactatgggattcttttttttcttctcattagcctaatgtcggattttctcctctctgatacacttgtggtgtaatagaatctatgctgcgtgttgnacanannat

SEQ ID NO: 30691 - DNA, 414 bp, Zea mays
  unsure at all n locations
  Clone ID: LIB3180-019-P2-M1-B1.R2
ggggngggggggggggggggggggggggggggggngggggngggggggngggggggggggngggnngggggggggggggggggggggggggggggtggggggggggggggggggggggggggggggggggggggggggggggggggggggggggggggggggggggggggggggggggggggggggggggggggggggggggggggggngggggggggggggggnnggggggggggggggggggggggggggggnngggggggggggggggggggggggggggggggggggggggggggggggggggggggggnggngggggggngggngggggggggngggggggnggtggggggggggggnngggngggggggggngggggngggggngggnnggggggggggggggggggg

SEQ ID NO: 30692 - DNA, 536 bp, Zea mays
  Clone ID: LIB3180-038-P2-M2-C6.F2
tcgacccagcgtccgcggtcgcgtgggcggacgcgtgggcggccgcgtgggcggcggcgaagaagcctgctgaggaggagcccgcggcagagaaggcggcgaaggctccggcggggaagaagcccaaggccgtgaagcgcctcccggcgggcaagtccgccggtggggggggcggcgaggatcaagaaggggaaaaagaaagcgaagaagtccgtggggaccttcaagatctacattttcaaggtgctgaagcaggtgcaccccgacatcggcgttttgtccaaggccatgtccatcatgaactccttcattaacgacatcttttagaagctcgcggtcgagtccgccaagctggcgcgctcttacaagaagcccaccgtctcctcccgcgagatccagacctcggtgcgcctcgtcctccccggtgagcttgccaagcacgccgtctccgtgggcaccaaggccgtcgccaagttcacttcttcttaggctcatagtactaggctgggtggtgttggtagacgtggctcaatttt

SEQ ID NO: 30693 - DNA, 610 bp, Zea mays
  Clone ID: LIB3180-038-P2-M2-C6.R2
cccggggcggccgcccttttttttttttttttttttttttttttttttgtttttttttttttttttttttttttttggtttttttttttttttgttgggaagaaatatttttttaacatttttgttttagcccgcgtttttctttttaaatttttaaaccacaaggcctttttgggaggaaaaaaaaggggcctgagttttggggggggtcaaaaaccccccgttggatttaaaatttttttttggggggggggggattttccgttttaagggccccccaaaaatttcaaggtttaaacttggtccatggaaaaaacagttgtggggttttaaaaacgggttttggaaaaaggccccttaaaaaaaacggggggggggagaggggtttttagttttaacagtttaaatggggggggaggattttattcattaattccccccccagaaaaagggggggcgttttaccaaaacccccccccctttttttttgttgctaaaaaaaaaaaaacttgggggcgggtttggggccctcagaaaggggggggttggccagctccccgggggggaggggggccaccggggtttttttttcttgggggggggggggggg

SEQ ID NO: 30694 - DNA, 530 bp, Zea mays
  Clone ID: LIB3180-048-P2-B7.F1
aaaaacactaattattattttatatttatgttaacatcaataaaaagatatccaaccagtttatcctaaaaaagatgagaaaaatgtcatggaaggttcctcgctaactttcgcaagtttaggtgtcttttccaccgccacggcgcgtcacgaccggtgataaggaagatatcagtgaaacgcggagaagctctcaaatagccacgaatttcaatagaaaagattacaaaaatggtctgaaagttgccagtagtcacaagtgcatgccccagaatccagttgaccaaaagtaacttaactgtaagtgaatttatcatacaagtcgccgatcttgtgaggctagagatccaatcctgaaccaataaatatagtcacaagattgtcctgactatacatacaacggggtgttgcacgcctagcttctttcctctgggaagatgcctcttgtatcttcacgagttcagcatcttatcgcctctgggggagcattgatcggcattctttttccagcgaagtcatcttcaaagggg

SEQ ID NO: 30695 - DNA, 691 bp, Zea mays
  unsure at all n locations
  Clone ID: LIB3180-017-D8-R4A
ttctttctgtgctttaaaacgcgagcatgggctttaaggaactttttaatttttgaggtcatcctgtggcattcctctttctccttccttagctgcagatcaagatcatttaatctgctagaaatcttgcgcacttcagcattcttctcatccaaaattatctccaagagagatttatcatcacgcaaaagttccatgtcctgtcttatttgtttgagctgtatttcgtgatcctctttatcatcaccacttaacagtgtctccttttttctatcatcattattgtcagagacactgagactcctagatgagttagtttctccatcatcaggcttcttctcatgcctcatttcactcttcctactgggagaccgtgaatagctagattccctttcttgggaatttggccgtcggtcacgaagggagcgatggcccctggaatctccatcaggggaatgcctcctatgaggtgagcgcctcctatcaaacctatctctaaagtcaccagctctataatctcttctcccggcgcggngtgggaacgaggtgcgcgatccggggaaccggcggagctcggcgtgtccgtgcgcgaagctgcatgtgtcgcgggaacagncgccgcgctgncacagcgcgcacaacttcgtcttgtacgccggccccgcgcgcggnggccccagcaccccgggcg

SEQ ID NO: 30696 - DNA, 697 bp, Zea mays
  unsure at all n locations
  Clone ID: LIB3180-030-G3-F4A
ccgacaaagctcttgccacctgtttcagcagagagcatgtgcattgcagccttcagctcttgtcacaagcacagcctcgtcaggtcgccgtcggcctcctctccgggtgccagtgccagtgccaccggccgcgccgcctcgctctcggccgcgcaccgcttgtacggcacgaaccctctcccgccgaaggaagccgagctcacgcgcttggtcggcctcgggattgcggcccgtagcgccgcgtagccgtcgctggcgttctcttgcacgggaccgtggcgggactccgcggcggcgctggaggccacgctcgaacctgtcggcgacgacccttccctctgcgcgcgtctgtgatccagcggctctgaagcttgctggtgctcctgagccgaagccgccgaagcttgcgggtagtagaacaccgcgcacggcgggctcacgacgggttgcgccgcgaagccgtcccgccggggaacgaggcacgtgagctccggccacggtttccacgagctcgctcctgcggcaccgttaggagggctcccgtttctggctgcctcggcaacgctcgcaggcggagtgtccgtttccaggtctttcactttcaccacgacgaccttgnttccgaacagcttcacgactggagctnccgatcctagacgcgacacttcgtgtgcatgacagagcaccttggtacatg

SEQ ID NO: 30697 - DNA, 626 bp, Zea mays
  Clone ID: LIB3180-030-G3-R3C
gcacggcgcggtcagaagcccgcgccggagctcaagcggctggagaagacgtccctgcgcgaccgggtccgggacgaagggtcgccgacgtcggtgcttgcctcggcgcgcacggcgtcacgagcggaggtgtcgggcagcctggtcgcgaacagctcgagcgccagcaggtcgccagccctgtctgacgccggttccgacgagcgtggcgacggcggcggctcgctggcctcctcggtggaccgtgaggacggctgcgcgtcgccaaggacgagagcgccatgtaccaaggtgctctgtcatgcacacgaagtgtcgcgtctaggatcgggagctccagtcgtgaagctgttcggaaacaaggtcgtcgtggtgaaagtgaaagacctggaaacggacactccgcctgcgagcgttgccgaggcagccagaaacgggagcccttcttaacgtgccgcaggagcgagctcggggaaccgtgggcggagctcacgtgcctcgttccccggcgggacggcttcgcggcgcaacccgtcgtgagcccgccgtgcgcggtgttctactacccgcaagcttcggcgggttcggctcaggagcaccagcaagcttcagagccgctggatcac

SEQ ID NO: 30698 - DNA, 287 bp, Zea mays
  Clone ID: LIB3180-037-E3-F3A
ttcttctgactaccccaagtcgagtaggttgttgttgttgttgttctgttatgttgtgtctgccctttacctgatgctaagtggtaacactgacacccgcccatgttgacattgatatgtacatgtccgttacctgttttctttttgttggacaatccatatatacttttctgcatggcatgtggtcgatgtctgtataagtttattacatatctgattgaacccataaggcagaaagcttgggtgatatctaaacaatgatgcatctccatgttttttcttctttc

SEQ ID NO: 30699 - DNA, 461 bp, Zea mays
  Clone ID: LIB3180-023-P2-M1-D7.F2
aaaaaaaatgggcttgggaacaaaaagggcgggggggcccctgggaaaaaaaaaggggggcccctttaggggggacaaacaacccttaaaaaacaaccccaaaaaaagggttttaaaaaaaaggaaaaaatccccaggcccccctatggaaggcgggggggaaaaatttaataaaaaacttcgggccccggtaaagaccgggtttttcatcccccccgggggggaaggggacccctgggggggcccccccccgggggggaacaccaaaaggggagcgcccctgccgagggcccccgagggggaaaccccggagaggggggagggtttgcccccgggtccaaaattttaaaaaacccaccggggaaaaagggttttaagggaaatctcgccccccaaaaaggccggggcaaaaaaacccgaaaaaggggggggggacaaggtcgggttcaaggaacaactgg

SEQ ID NO: 30700 - DNA, 533 bp, Zea mays
  unsure at all n locations
  Clone ID: LIB3180-023-P2-M1-D7.R1
cgaaacgtggcgtacccgaagaacgtgtcggacccgctgctccgggagtgggtgaagctgcgcacaaccccgtcatcgtccccgagggcggcatcaacgcgacgcattccgcgacccgaccacggcctggcgcggccccggccccgagcagtggcnctgctctcggcacgcggcgaggtcgtcgccccggggatggcgtacgtgtaccgcagccgggacttccggcggtggaggcgggtgcggcggccgtgactcggcgcccacggggatgtggagtgccccgacttctacccggtgagcaagggcgcgcccccggggctcgagacgtccgtgccgcccgcccaagggtgaacacgtgctcaagaacagcctcgacctccggcggtacgactactacaccgtgggcacgtaccacccgttggccgagcggtactgccggacgaccccgccggcgacgagcaccgcctgcgctacgactacggcaacttctacgcgtccaagacgttctacgacccggccaagcggcgccgcat

SEQ ID NO: 30701 - DNA, 545 bp, Zea mays
  Clone ID: LIB3180-023-P2-M1-D7.R2
cagaacgtggcgtacccgaagaacgtgtcggacccgctgctccgggagtgggtgaagccctcgcacaaccccgtcatcgtccccgagggcggcatcaacgcgacgcagttccgcgacccgaccacggcctggcgcggccccggccccgagcagtggcggctgctcgtcggcagcgcggcggggtcgtcgccccgcggcgtggcgtacgtgtaccgcagccgcgacttccggcggtggaggcgggtgcggcggccgctgcactcggcgcccacggggatgtgggagtgccccgacttctacccggtgagcaagggcggcgcgccgcgcgcggggctcgagacgtccgtgccgcccggcccaagggtgaagcacgtgctcaagaacagcctcgacctccggcggtacgactactacaccgtgggcacgtaccacccgtgggccgagcggtacgtgccggacgaccccgccggcgacgagcaccgcctgcgctacgactacggcaacttctacgcgtccaagacgttctacgacccggccaagcggcg

SEQ ID NO: 30702 - DNA, 559 bp, Zea mays
  Clone ID: LIB3180-023-P2-M1-E6.F2
gatcaccaacctgaatttttttttatttttttgtggaatttacattggtataagcatgggactcttttcatatcagatggggcgaccacgggaaacacactaaaataaaacacgtaacataaagggcaatgcgttcacgtttttcaggggagcccccaccgggctgcagcttactatgactactggcactccgaggcttggagcctgcggggtctctctacttgagagatcttggttggcacggtgaggttggacggcatgaaaccctagagccccattccagaaactttttgctggtgtcgtccttgtgcgcgatcacctgcgatgaagcacaggcagtaccttcttggtcccctagcgctgtctcaatggcagccgtcagctcctcctcgctcttaccttggaggtccagcacttgcccaagccattgtggatggcgtccacaaagccagtgtagttccaggtcttgatgacgttgtatggcccggcatggatttccacctcaatcgtgtacccaccgctgttgatcaggaagattatgctggtctgctaaaatcgc

SEQ ID NO: 30703 - DNA, 445 bp, Zea mays
  Clone ID: LIB3180-023-P2-M1-E6.R1
cgcgacttgccaggaaaccaatgagcagcttgttgtatgctcacatgcatggtatggctacactgcatgtctacctcggcccggcgcccgtttccacccaccttcgatcctccgaatccgattgagtgcttgcaccgcatccatggacacccacatcggatccgtgaacggggcggcgtcgaaccagacggtctggctgcccggcgtcggcggactgacccgatggcgtccacgcggcgcccggtctgacctctgtggcggcgggatgcgtcgctgggggccacctcgcgcgtcgctcgtgcaggtcggcgtcaacgagctcttcgcggtctccgggggacttcaagctcacgctgctcgaccacctgatcgctgagcccgccctgcgactcgtcggctgatgcaacgagctcaacgccgcagtacgcagccgatcggtacgcgc

SEQ ID NO: 30704 - DNA, 428 bp, Zea mays
  unsure at all n locations
  Clone ID: LIB3180-028-P2-M2-C1.F1
ggcacatatctgatgctgtacaatatcagtatcgtacaaggcacaacagaacattacagataattgaatgcgggaaaaaagggaaatgcactggagagagccaaggcagctcacaccccatggttaacctagcacaagtgcacaagggacaccaaaaccggcaaattgacgccctactaataaaagtacactgcacatagggaagtgaatgtctcagttgattgtcgcgagcggcaaagggntatctgagataacttagattctttgctcgattcatgttcatacggatggttctcacggaactcattcatcatggtctccacgggcatggctcgcagcgattcaatcgagcctttgcttggcacgttcggctcagacctcaccggagtttcacctgagggttcgtagtccttgtaactggtttggag

SEQ ID NO: 30705 - DNA, 429 bp, Zea mays
  Clone ID: LIB3180-028-P2-M2-C1.F2
ggcacatatctgatgctgtacaatatcagtatcgtacaaggcacaacagaacattacagataattgaatgcgggaaaaaagggaaatgcactggagagagccaaggcagctcacaccccatggttaacctagcacaagtgcacaagggacaccaaaaccggcaaattgacgccctactaataaaagtacactgcacatagggaagtgaatgtctcagttgattgtcgcgagcggcaagcgaggtatctgagataacttagattctttgctcgattcatgttcatacggatggttctcacggaactcattcatcatggtctccacgggcatggctcgcagcgattcaatcgagcctttgcttggcacgttcggctcagacctcaccggagtttcacctgagggttcgtagtccttgtaactggtttggag

SEQ ID NO: 30706 - DNA, 428 bp, Zea mays
  Clone ID: LIB3180-028-P2-M2-C1.R1
ctccaaaccagttacaaggactacgaaccctcaggtgaaatccggtgaggtctgagccgaacgtgccaagcaaaggctcgattgaatcgctgcgagccatgcccgtggagaccatgatgaatgagttccgtgagaaccatccgtatgaacatgaatcgagcaaagaatctaagttatctcagatacctcgcttgccgctcgcgacaatcaactgagacattcacttccctatgtgcagtgtacttttattagtagggcgtcaatttgccggttttggtgtcccttgtgcacttgtgtagggttaaccatggggtgtgagctgccttggctctctccagtgcatttcccttttttcccgcattcaattatctgtaatgttctgttgtgccttgtacgatactgatattgtacagcatcagatatgtgcc

SEQ ID NO: 30707 - DNA, 429 bp, Zea mays
  Clone ID: LIB3180-028-P2-M2-C1.R2
ctccaaaccagttacaaggactacgaaccctcaggtgaaactccggtgaggtctgagccgaacgtgccaagcaaaggctcgattgaatcgctgcgagccatgcccgtggagaccatgatgaatgagttccgtgagaaccatccgtatgaacatgaatcgagcaaagaatctaagttatctcagatacctcgcttgccgctcgcgacaatcaactgagacattcacttccctatgtgcagtgtacttttattagtagggcgtcaatttgccggttttggtgtcccttgtgcacttgtgctaggttaaccatggggtgtgagctgccttggctctctccagtgcatttcccttttttcccgcattcaattatctgtaatgttctgttgtgccttgtacgatactgatattgtacagcatcagatatgtgcc

SEQ ID NO: 30708 - DNA, 500 bp, Zea mays
  unsure at all n locations
  Clone ID: LIB3180-030-P2-M2-A2.F1
aaacttgaaaatagtctatatagccgacaaattaaacactcgacaactggttacacttgcagacaaacaaccgagcaaaaaatcaaacaacaaaagtatgaagcatatcgggatgggatgggatgcgatgcgatgcaatgcgaatgcaatgcaagggccccttngtgatttggatttggcgccccagatttactcccggatcacatgacgatctcgggcttgaggatgctggatttgatctccttgtgcgggacaacagccgccgttgctgtagatctcgtcgcagtagnnacgtcctcgccgaggatggtcatgttctcgacgcgcgcccacttgccgacggtggagtgccagccgatgatgctgctggagacgcagtgngctgcttgacgcgcgcggcactgnaacggtgcagcgggacaggcgcaccccggcctccaccacgcagcctggcccgaccgcgacgtcgcngnantagaggcagccgtccccgatgaccg

SEQ ID NO: 30709 - DNA, 503 bp, Zea mays
  Clone ID: LIB3180-030-P2-M2-A2.F2
aaacttgaaaatagtctatatagccgacaaattaaacactcgacaactggttacacttgcagacaaacaaccgagcaaaaaatcaaacaacaaaagtatgaagcatatcgggatgggatgggatgcgatgcgatgcaatgcaatgcaatgcaagggccccttgtgatttggatttggcgccccagatttactcccggatcacatgacgatctcgggcttgaggatgctggatttgatctccttgtgcgggagcacgacgccgccgttgctgtagatctcgtcgcagacgtggacgtcctcgccgaggatggtcatgttctcgacgcgcgcccacttgccgacggtggagtgccagccgatgatgctgctggagacgcaggcgtgctgcttgacgcgcgcggcgcgcatgacggtgcagcgggacaggcgcaccccggcctccaccacgcagcctggcccgaccgcgacgtcgggcccgatgaggcagccgtccccgatgaccg

SEQ ID NO: 30710 - DNA, 496 bp, Zea mays
  unsure at all n locations
  Clone ID: LIB3180-030-P2-M2-A2.R1
cgtcatcggggacggctgcctcatcgggcccgacgtcgcggtcggnggctgcgtggtggaggccnggggtgcgcctgtcccgctgcaccgtcatgcgcgccgcgtcaagcagcacgcctgcgtctccagcagcatcatcggctggcactccaccgtcggcaagtgggcgcgcgtcgagaacatgaccatcctcggcgaggacgtccacgtctgcgagcagatctacagcaacggcggcgtcgtgctcccgcaaaaggagatcaaatccagcatcctcaagcccgagatcgtcatgtgatccgggagtaaatcctggggcgccaaatccaaatcacaaggggcccttgcattgcattgcattgcatcgcatcgcatcccatcccatcccgatatgcttcatacttttgttgtttgattttttgctcggttgtttgtctgcagtgtaaccagttgtcgagtgtttaatttgtcggctatatagactattttcaagttt

SEQ ID NO: 30711 - DNA, 503 bp, Zea mays
  Clone ID: LIB3180-030-P2-M2-A2.R2
cggtcatcggggacggctgcctcatcgggcccgccgtcgcggtcgggccaggctgcgtggtggaggccggggtgcgcctgtcccgctgcaccgtcatgcgcgccgcgcgcgtcaagcagcacgcctgcgtctccagcagcatcatcggctggcactccaccgtcggcaagtgggcgcgcgtcgagaacatgaccatcctcggcgaggacgtccacgtctgcgacgagatctacagcaacggcggcgtcgtgctcccgcacaaggagatcaaatccagcatcctcaagcccgagatcgtcatgtgatccgggagtaaatctggggcgccaaatccaaatcacaaggggcccttgcattgcattgcattgcatcgcatcgcatcccatcccatcccgatatgcttcatacttttgttgtttgattttttgctcggttgtttgtctgcaagtgtaaccagttgtcgagtgtttaatttgtcggctatatagactattttcaagttt

SEQ ID NO: 30712 - DNA, 540 bp, Zea mays
  unsure at all n locations
  Clone ID: LIB3180-035-P2-M2-F2.F1
gcaacagaaatatcgcccggtttgtttccctgctcagttttcttgactacgatatgggacagctatgaacagagaggagtaaaagaccggccggcagcgcgccttatcgtcctccttccggttcgtttcgtgtttgtcatctatctctgtctcgctctctctacacttctactacaagcaaccaatccaattttgcaggtcggtaataaggacgcacatacgacggcgcccagagccggaggagtagtctgtactggccgtgcgggcggggaagacgctggagaagacggtggatggacgacgttagccgaggtgcttggcgtcgaggatgggcgggtcggcgaagggcccgtagagccagcccctgagntagtggccgtaggccagtccgtgagggtggatgccgtcccaactccagtggttggaggggtccgggcacgcgtacgccccggctcgccgcacttggacgtcaggttgaagttgtactcgcccacgcccggcgcgccgcagcacgcccgcggtccatgcttcacaatcccg

SEQ ID NO: 30713 - DNA, 551 bp, Zea mays
  Clone ID: LIB3180-035-P2-M2-F2.F2
gcaacagaaatatcgcccggtttgtttccctgctcagttttcttgactacgatatgggacagctatgaacagagaggagtaaaagaccggccggcacgcgcgccttatcgtcctccttccggttcgtttcgtgtttgtcatctatctctgtctcgctctctctacacttctactacaagcaaccaatccaattttgcaggtcggtaataaggacgcacatacgacggcgcccagagccggaggagtagtctgtactggccgtgcgggcggggccggcgctggagaagacggtggatggacgacgttagccgaggtgcttggcgtcgaggatgggcgggtcggcgaagggcccgtagagccagcccctggcgatgtggccgtaggcggcctccgtgaggtggatgccgtcccaactccagtggttggaggggtccgggcacgcgtacgcccccggctcgccgcacttggacgtcaggttgaagttgtactcgcccacgcccggcgcgccgcagcacgcccgcggcgtctgcttcagcatcccgtatttctcg

SEQ ID NO: 30714 - DNA, 533 bp, Zea mays
  unsure at all n locations
  Clone ID: LIB3180-035-P2-M2-F2.R1
tcatgactgcgtcnantagccaattaattagccaccactccatcgaaaggacccgatcaaactttagtctactcgtcctcctcttctcgcagcagccagcagaccaatcgggacaagcaaactcccccgattagtttaagcagcccgggcccggcgacgaccagctccgttccgcgcggggatttaaacgcgangaggaagggcacgcagcaggcggcagcggcaagcaacgaacgcgatcgggccgacgacgaggcgtgccgggcctggtggtgcgtgtttgcggactccgctgcatcgcctcggtcggtcgtcgtcatatcatgggtgtccggctgccggtggcgtggtccgcgtcctcgtcctcctcgtgcgggcggccgtggcgcgggagtacgcggccagtcttcaacttcgngggactcccgtggtggacgccggcaaccttggtggtggacggcatcccggactacctggccacggcgcgcctgccctacggcatgacccacttcgggtaccccaccggccgctgc

SEQ ID NO: 30715 - DNA, 542 bp, Zea mays
  Clone ID: LIB3180-035-P2-M2-F2.R2
tcatgactgcgtcatgcatgccaattaattagccaccactccatcgaaaggacccgatcaaactttagtctactcgtcctcctcttctcgcagcagccagcagaccaatcgggacaagcaaactcccccgattagtttaagcagcccgggcccggcgacgaccagctccgttccgcgcggggatttaaacgcgcgaagcgagaaggcacgcagcaggcggcagcggcaagcaacgaacgcgatcgcgcgccgacgacgacgcgcggtgccggcgcctggtggtgccgtgttgcggactccgctgcatcgcctcggtcggtcgtcgtcatatcatgggtgtccggctgccggtggcgtggtccgccgtcctcgtcctcctcgtgcgggcggccgtggcgcgggagtacgcggccatcttcaacttcggggactccctggtggacgccggcaacctggtggtggacggcatcccggactacctggccacggcgcgcctgccctacggcatgacccacttcggctaccccaccggccgctgctcc

SEQ ID NO: 30716 - DNA, 454 bp, Zea mays
  unsure at all n locations
  Clone ID: LIB3180-036-P2-M2-C7.F1
attggactatatgatagtaattctgattaatgttgctacacatgccaaatctgtcaaattcctccgtgtgtacattttgaacatacagttcttacaaaaccaaacacatcggacccacctacaacaggggcaaaccaacgcaaaaagaatcccaaagctaaaatcacaacccaggttccaggagatcttggcacgagagccgaagagttacacggatgcggctggtacggtgggctattgtattctagccagcagcgtgactgggtttgccattgggtgccctaagggatggttccgccagtntttgaggcaccatttcctccaggcgctttcacatggcgtctcgttttgaatcagattccgcctgcttgagctcctcgtcactgaacctctggacgcactccccgaagatgtgggatcatggtctgagaagatcttgcgtacgttcagtgtc

SEQ ID NO: 30717 - DNA, 539 bp, Zea mays
  Clone ID: LIB3180-036-P2-M2-C7.F2
attggactatatgatagtaattctgattaatgttgctacacatgccaaatctgtcaaattcctccgtgtgtacattttgaacatacagttcttacaaaaccaaacacatcggacccacctacaacaggggcaaaccaacgcaaaaagaatcccaaagctaaaatcacaacccaggttccaggagatcttggcacgagagccgaagagttacacggatgcggctggtacggtgggctattgtattctagccagcagcgtgactgggtttgccattgggtgcacctaagggatggttcccgccaggttttgaggcacccatttcctccaggcgcttccacatggcgtctcgttttgaatcagattccgcctgcttgagctcctcgtcactgaacctctggacgcactccccgaagaatgtggaatcatggtctgagaagatcttgcgtacgttcagtgtcaggctacggacagcttggttccagtgatctctggagtttctctcgagtgctggatagatgatcggtaacagcaccttgtag

SEQ ID NO: 30718 - DNA, 534 bp, Zea mays
  unsure at all n locations
  Clone ID: LIB3180-036-P2-M2-C7.R1
ngatagagaaagagagcctgtcagcccaagaaaaggttcctcccctccttccccacctcgccctcagccctcatcatcctctaacatccgattgtgccctgtgctctgcggttctcggatccaagatttcgccggccggcgggcgtngngcatccggcctccgggagcgggagaaagactggatttttcgggccatggagatgtggcctgatccgttcaggcacgggcggtggggtggcttcctgagcaggtctgattcgtatcggttcaaatgatctcggcggcttgattggtcggttccgcttccgccgggggatcggagctagggcggtggtttcttggccggccggtggattcatcggctcgggtctggtgggatcttggtggttgctggttcacacacgagccgcagtctgcgtagatcccctcttcgcttccgtggcggatttgtactgctagggttttggttgggtctggtggaagatgattaagcagatccttggcaggctgcagaggaagccggggaaggctggg

SEQ ID NO: 30719 - DNA, 554 bp, Zea mays
  Clone ID: LIB3180-036-P2-M2-C7.R2
gatagagaagagacctgtcacccagaaaaggttcctcccctccttccccacctcgccctcagccctcatcatcctctaacatccgattgtgccctgtgctctgcggttctcggatccaagatttcgccggccggccgccggcggtggctccggcctccgggagcgggagaaagactggatttttcgggccatggagatgtggcctgatccgttcaggcccgggcggtggggtggcttcctgagcaggtctgattcgtatcggttcaaatgatctcggcggcttgattggtcggttccgcttccgccgggggatcggagctagggcggtggtttcttggccggccggtggattcatcggctcgggtctggtgggatcttggtggttgctggttcagcacacgagccgcaggtctgcgtagatcccctcttcgcttccgtggcggatttgtactgctagggttttggttgggtctggtggaagatgattaagcagatccttggcaggctgccgaggaagccggggaaggctggggatagccgggaagctgctgctc

SEQ ID NO: 30720 - DNA, 539 bp, Zea mays
  unsure at all n locations
  Clone ID: LIB3180-054-P2-M1-E1.F1
gcgncggtacgctggcgtcgctcgtcgaggcacgcgcgtcgtctgcggagccttcacgtgcgtcgtgtacgcataccgtacgaggactagggtgctgcccgtgggcggcgaatgggcctgcccgccgtccccttctccacgcatcgtgcgccgtcagcgcgtgtactaccacttcagccaggggaggcttgcctngcctccgnggggcggccgcggacggagcgacggtggtgctggtgccgccgccctgagcgaggcgttcctggggctgccggagatggagaggtcggagctcccgtcgttcgtgttcgaccatggtccgtacccgaccatcgccatgcaagcgattaaacagttcgctcatgcggaaaggatgactgggtgctgttcaactcgttcgaaaatggaaaccgaggttttggctggcctgacaaagtacctgaaggcccgagccatcgcccaatgcgtgccgctgcccaccgctggaaggaccgccggcgccaattggccggatcacctacggggccaacctggtgaat

SEQ ID NO: 30721 - DNA, 529 bp, Zea mays
  unsure at all n locations
  Clone ID: LIB3180-054-P2-M1-E1.F2
gcgtcggcgtcgctggcgtcgctcgtcgaggcacgcgcgtcgtctgcggacgccttcacgtgcgtcgtgtacgactcgtacgaggactgggtgctgcccgtggcgcggcgaatgggcctgcccgccgtccccttctccacgcagtcgtgcgccgtcagcgccgtgtactaccacttcagccaggggaggcttgccgtgcctccgggggcggccgcggacggcagcgacggtggtgctggtgccgccgccctgagcgaggcgttcctggggctgccggagatgggagaggtcggagctcccgtcgttcgtgttcgaccatggtccgtacccgaccatcgccatgcaagcgattaaacagttcgctcatgcgggaaaggatgactggggtgctgttcaactcgttcgaagaactggaaacccgaggttttggctggcctgancanagtacctgaggcccgagccatcggcccatgcgtgccgctgcccaccgcttggaaggaccgccggcgccaatggncggatcacctac

SEQ ID NO: 30722 - DNA, 525 bp, Zea mays
  Clone ID: LIB3180-054-P2-M1-E1.R1
gttctagatcgcgagcgccgcccttttttttttttttttttcatagggtagaaaataaaaggctgaataattgttatggtagaatcctcaagcaaagtatattattatggctggtggacccaaagcataaaccaaaccaagtagaggcaccaactttcgaccgttttttgcttccagtttcgaaacgtttctccttcgcatcgcgtcgtcacatctgggaccctgcaacatcacctcccttcacacttcacagccagcgcctctcacttctccgtggcgccggcgcgacaaactgcacgaactcgtccaggttgcggtcagagctgccaccgggtgccaccgccgcggagccctagtccctccattcccccgccgccttggtgcagcagacgccgcctcgcccccgtccatgacgcgcgcacgacgcgtccacttccccgcgaagaacacgcccgcgccagatcgcggcgggcaaacgcccgcctcaagtgcgaggctcgacgttccgagcgttggtcggctggt

SEQ ID NO: 30723 - DNA, 529 bp, Zea mays
  unsure at all n locations
  Clone ID: LIB3180-054-P2-M1-E1.R2
gttctagatcgcgagcgccgcccttttttttttttttttttcatagggtagaaaataaaaggctgaataattgttatggtagaatcctcaagcaaagtatattattatggctggtggacccaaagcataaaccaaaccaagtagaggcaccaactttcgaccgttttttgcttccagtttcgaaacgtttctccttcgcatcgcgtcgtcacatctgggaccctgcaacatcacctcccttcacacttcacagccagcgcctctcacttctccgtggcgccggcgcgcacaaactgcacgaactcgtccaggttgcggtcagagctgccaccgggtgccaccgccgcgcgagccctgtccctccattcccccgccgccttgcgtgcagcagacgccgcctcgcccccgtccatgacggcgcgcacgcaccgctccacttccccgcgaaggaacacgcccgcgccagattngcggngcgcgcgcacgcccgcgccccaggcagcttcgacgttccgagcgttgggtcggc

SEQ ID NO: 30724 - DNA, 201 bp, Zea mays
  Clone ID: LIB3180-054-P2-M1-F3.F2
acaaaagaatgctgaaacctgataataatagtgtacaagtatggcatccaactttgcacaatgaacaaataggccacccacaaacggattccagcacgagtatggctactgagttgcaaaatacaaaaacatgtattgtctaaggcacggggacgattctcgatgcgacagaaaaacacgaccacggtgatctaactccac

SEQ ID NO: 30725 - DNA, 218 bp, Zea mays
  Clone ID: LIB3180-054-P2-M1-F3.R2
ggttcctcctccgcgcttccttcgccgaggcgtaagcgtcagcgagggcgtataaatcgctcccctccgcacattcgccaccgcctctccggtcctggacaagaccaatggcggctgctgcatgctctgctctgcacgccggcggcgccgccggctccggcaagcctagatccgtcttccacgagccggcgacgacgaggagcgtgcgcgtggggcac

SEQ ID NO: 30726 - DNA, 543 bp, Zea mays
  unsure at all n locations
  Clone ID: LIB3180-055-P2-M1-C7.F1
gcgctgctgctggccgcgccggcgggcgtcgaanacttcggcgcggaggacctggcgtcggaggaggcgctgtgggctgtacgacctggccggccgcacgcgtggcgagnacctgggcgacaagcgcgccgcttcaacgtcttcaaggccaacgtgcgcctcatccacgagttcaaccgccgggacgagccctacaagctccgcctcaaccgcttcggcgacatgaccgccgacgagttccgacgccactacgcgggctccagggtcgcgcaccaccgcatgttccgcggcgacaggcagggctcctcggcgtcggcgtcgtcgttcatgtacgccgcgnncgcgacgtcccggcctccgtcgactggaggcagaagggcgctgtcaccgacgtcaaggaccagggccaatgcggtacgtgctgggcgttctcgacgatcgccgccgtggagggcatcaacgcgatcaagaccaagaacctgacgtcgctgtcggagcacagcttggtggactgcgacaccaaggccaacgccggctgcaacg

SEQ ID NO: 30727 - DNA, 565 bp, Zea mays
  unsure at all n locations
  Clone ID: LIB3180-055-P2-M1-C7.F2
gcgctgctgctggccgcggcgccggcgccggcggccgcggtcgacttcggcgcggaggacctggcgtcggaggaggcgctgtgggcgctgtacgagcgctggcgcggccgccacgcgctggcgcgggacctgggcgacaaggcgcgccgcttcaacgtcttcaaggccaacgtgcgcctcatccacgagttcaaccgccgggacgagccctacaagctccgcctcaaccgcttcggcgacatgaccgccgacgagttccgacgccactacgcgggctccagggtcgcgcaccaccgcatgttccgcggcgacaggcagggctcctcgggttncnggcggncgtcgttcatgtacgccgacgcgcgcgacgtcccggcctccgtcgactggaggcagaagggcgctgtcaccgacgtcaaggaccagggccaatgcggtagctgctgggcgttctcgacgatcgccgccgtggagggcatcaacgcgatcaagaccaagaacctgacgtcgctgtcggagcagcagctggtggactgcgacaccaaggccaacgccggctgcaacg

SEQ ID NO: 30728 - DNA, 494 bp, Zea mays
  Clone ID: LIB3180-055-P2-M1-C7.R1
agttaaataatataataataaccgaatgaaatggaagttgctggtacatcaagtctcgactggtattacatgaatgcaggtgtatgatgtgcgtatccattcagacattcacagtcggcgatgttcctgtccgagcatacatggatcaatcatagtatagctatataggctatagctagtacgtatagtgtagtgcgcaattcagagctcgtcatggctggagccgtcctcgtcgacgacggcgtggaccttggggttgggcgaggtcttgacggggtaggatgcctccatggcgatgcgcagtgtccctccttggcggccacgtcgcgcgccatgcggatgtaccccttctcgccccactcgggccccacgagttcttgaccagccagtacttggtgccgtccgcggtgaccccgtagccgaccgccgtgacgccgtggtccagctccgtcccgcacctgccggagaacaccccctcggagtagaactggaag

SEQ ID NO: 30729 - DNA, 479 bp, Zea mays
  Clone ID: LIB3180-055-P2-M1-C7.R2
agttaaataatataataataaccgaatgaaatgaaagttgctggtacatcaagtctcgactggtattacatgaatgcaggtgtatgatgtgcgtatgccattcagacattcacagtcggcgatgttcctgtccgagcatacatggatcaatcatagtatagctatataggctatagctagtacgtagtagtgtagtgcgcaattcagagctcgtcatggctggagccgtcctcgtcgacgacggcgtggaccttggggttgggcgaggtcttgacggggtaggatgcctccatggcgatgccgcagtgtccctccttggcggccacgtcgcgcgccatgcggatgtaccccttctcgccccactcggggccccacgagttcttgaccagccagtacttggtgccgtccgcggtgaccccgtagccgaccgccgtgacgcccgtggtccagctccgtcccgcacctgccggagaacaccc

SEQ ID NO: 30730 - DNA, 523 bp, Zea mays
  unsure at all n locations
  Clone ID: LIB3180-059-P2-M1-C7.F1
acaaaagaatgctgaaacctgataataatagtgtacgagtatggcatccaactttgcacaatgaacaaataggccacccacaaacggcatccagtacgagtatggcttctgcgttgcaaaatacaaaaacatgtcttgtctaaggcacggtgacagtcgcgatgcagnnagaaacaaaaccacggtaatctgactccacagatcaggtactcaacaaagccatgatatcactgatcattggcagatctgctcgacggcggccacgatctgcgcgggctgcaccacggtggcgtcctccagcgtcggacgtacggggtcggcagtcctgcgacgacaggcacatgatgggggcgtccaggtagtcccagaagttgtcgatgatggccgaccgcagctggcgccgatgccgcccgtccgcatgcactcctccacgatcagcacgcggtgggtcttcttgatcgagttcccgatcgtgtgcaggtcgaacggcttcagcgacctgatgtcgatgacctcggggtcg

SEQ ID NO: 30731 - DNA, 540 bp, Zea mays
  unsure at all n locations
  Clone ID: LIB3180-059-P2-M1-C7.F2
acaaaagaatgctgaaacctgataataatagtgtacgagtatggcatccaactttgcacaatgaacaaataggccacccacaaacggcatccagtacgagtatggcttctgcgttgcaaaatacaaaaacatgtcttgtctaaggcacggtgacagtcgcgatgcgacagagaaacaaaaccacggtaatctgactccacagatcaggtactcaacaaagccatgatatcactgatcattggcagatctgctcgacggcggccacgatctgcgcgggctgcaccacggtggcgtcctccagcgtcgcggcgtacggggtcggcacgtcctgcgacgacaggcacatgatggngggcgtccaggtagtcccagaagttgtcgatgatggccgaccgcaggctggcgccgatgccgcccgtccgcatgcactcctccacgatcagcacgcggtgggtcttcttgatcgagttccccgatcgtgtgcaggtcgaacggcttcagcgacctgatgtcgatgaccttcggggtcgtaccccttgt

SEQ ID NO: 30732 - DNA, 555 bp, Zea mays
  unsure at all n locations
  Clone ID: LIB3180-059-P2-M1-C7.R2
gcttcctcctccgcgcttccttcgccgaggcgtaagcgtcagcgagggcgtataaatcgctcccctccgcacattcgccaccgcctctccgctcctcgacaagaccaatggcggctgctgcgtcctctgctctgcacgccgttggcgccgtcgcctccgccaagcctagatccgtcgtccccgcggtggcgacgaggaggagcgtgcgcgtggcgcccgcggccaagcgaggaccaggctcgggaggaggcaggctcgtggctcgcagcgccgttgcagccaaggcggatgaggcggccgcggcggcgggatccaagtcaggcggccatgagttgctgatgtttgaggcccttcgtgaagccttgatagaagagatgaatttggatccaacagtgtgcgtcatgggtgaagatgttggtcattatggaggttcatacaaggtgaccaaagggttggctgagatgttcggagatctccgggtccttgatacccctatcgccgagaactccttcactggncatgggagttggagcagcaatgaaggggctgaggcct

SEQ ID NO: 30733 - DNA, 523 bp, Zea mays
  unsure at all n locations
  Clone ID: LIB3180-059-P2-M1-E2.F1
ggaacaatacttttttcttttcatttcaattgttcattcaggtcattgctcacactgacactgccacccatggtgatgcgtgacacattattactcaatcatcgccgctaaatgactcaactagctagctagccagcggctatactacagcacatagtttcttcagtgggggacaccgccggcagcagcgtaggggcatggagtcggctgctgcaggccgcacatcgccgtcagttgctgcgctatctgcgcgccaacagccccgcgacctggccgctttcgtcgctgctgcaggatggactggaggaccaagccgaagatcgcctggtaccggtgctgcggctccacctgcctgagctgctggcaacactgctgccgcaacgactggcactgaggcgagcagtagggcgtcgcgntcgggctgcactgatgcctcaggaactcgacgcactggcccaggatcggggtgctgccaacgccgcaggttccctgaagctggcacgggcttggatgcggctgttgg

SEQ ID NO: 30734 - DNA, 544 bp, Zea mays
  unsure at all n locations
  Clone ID: LIB3180-059-P2-M1-E2.F2
ggaacaatacttttttcttttcatttcaattgttcattcaggtcattgctcacactgacactgccacccatggtgatgcgtgacacattattactcaatcatcgccgctaaatgactcaactagctagctagccagcggctatactacagcacatagtttcttcagtgggggacaccgccggcagcagcgtaggggcatggagtcggctgctgcaggccgcacatcgccgtcagttgctgcgctatctgcgccgccaacagccccgcgacctggccgctttgcggctgctgctgcaggatggactggaggaccaagccgaagatcgcctggtaccggtgctgcggctccacctgcctgagctgctggcaacactgctgccgcaacgactggcactgaggcgagcangtagggcgtcgccgtcgggctgcactgatgcctcaggaactcgacgcactggcccaggatcggggtgctgccaacgccgcaggttccctgcagctggcacgggcttggatgccggctgttggcacgggcattgggtgt

SEQ ID NO: 30735 - DNA, 539 bp, Zea mays
  unsure at all n locations
  Clone ID: LIB3180-059-P2-M1-E2.R1
gggtcttcagaccattagctttatctactccagagcgcagaagaacccgatcgacaccatgagggtgttgctcgttgccctcgctctcctggctctcgctgcgagcgccacctccacgcatacaagcggcggctgcggctgccagcaccgcggcgttcatctaccgccgccggtgcatctgccacctccggttcacctgccacctccgggtcatctcccaccgccggtccacctgccgccgccggtccacctgccaccgccggtccatgtgccgccgccggttcatctgccgccgccaccatgccactaccctactcaaccgccccggcctcagcctcatccccagccacacccatgcccgtgccaacagccgcatccaagcccgtgccagctgcagggaactgcgtngtnggcagcaccccgatcctgggccagtgcgtcgagttcctgaggcatcagtgcagcccgacggcgacgcgctactgctcgcctcagtgccagtcgttgcggcaacggtgttgccagcagctcaggcaggt

SEQ ID NO: 30736 - DNA, 556 bp, Zea mays
  Clone ID: LIB3180-059-P2-M1-E2.R2
gggtcttcagaccattagctttatctactccagagcgcagaagaacccgatcgacaccatgagggtgttgctcgttgccctcgctctcctggctctcgctgcgagcgccacctccacgcatacaagcggcggctgcggctgccagccaccgccgccggttcatctaccgccgccggtgcatctgccacctccggttcacctgccacctccggtgcatctcccaccgccggtccacctgccgccgccggtccacctgccaccgccggtccatgtgccgccgccggttcatctgccgccgccaccatgccactaccctactcaaccgccccggcctcagcctcatccccagccacacccatgcccgtgccaacagccgcatccaagcccgtgccagctgcagggaacctgcggcgttggcagcaccccgatcctgggccagtgcgtcgagttcctgaggcatcagtgcagcccgacggcgacgccctactgctcgcctcagtgccagtcgttgcggcagcagtgttgccagcagctcaggcaggtggagccgcagcac

SEQ ID NO: 30737 - DNA, 552 bp, Zea mays
  unsure at all n locations
  Clone ID: LIB3180-061-P2-M1-F1.F1
acggcgccttttttttttttttttttttgattgtataaacctattaaaaggttaaaacgtttaatttggaacaatacttttttcttttcatttcaattgttcattcaggtcattgctcacactgacactgccacccatggtgatgcgtgacacattattactcaatcatcgccgctaaatgactcaactagctagctagccagcggctatactacagcacatagtttcttcagtgggggacaccgccggcagcagcgtaggggcatggagtcggctgctgaggccgcacatcgccgtcagttgctgcgctatctgcgcgccaacagccccgcgacctggccgctttgtgncatgctgcaggatggactggaggaccaagccgaagatcgcctggtaccggtgctgcggctccacctgcctgagctgctggcaacactgctgccgcaacgactggcactgaggcgagcagtagggcgtcgcgctcgggctgcactgatgcctcagaaactcgacgcactggcccaggatcggggtgctgccaacgccgcagtt

SEQ ID NO: 30738 - DNA, 538 bp, Zea mays
  unsure at all n locations
  Clone ID: LIB3180-061-P2-M1-F1.F2
gattgtataaacctattaaaaggttaaaacgtttaatttggaacaatacttttttcttttcatttcaattgttcattcaggtcattgctcacactgacactgccacccatggtgatgcgtgacacattattactcaatcatcgccgctaaatgactcaactagctagctagccagcggctatactacagcacatagtttcttcagtgggggacaccgccggcagcagcgtaggggcatggagtcggctgctgcaggccgcacatcgccgtcagttgctgcgctatctgcgccgccaacagccccgcgacctggccgctttgcggctgctgctgcaggatggactggaggaccaagccgaagatcgcctggtaccggtgctgcggctccacctgcctgagctgctggcaacactgctgccgcaacgactggcactgaggcgagcagtangggcgtcgccgtcgggctgcactgatgcctcagaaactcgacgcactggcccaggatcggggtgctgccaacgccgcaggttccctgcag

SEQ ID NO: 30739 - DNA, 539 bp, Zea mays
  unsure at all n locations
  Clone ID: LIB3180-061-P2-M1-F1.R1
gggtcttcagacattagctttatctactccagagcgcaaagaacccgatcgacaccatgagggtgttgctcgttgccctcgctctcctggctctcgctgcgagcgccacctccacgcatacaagcggcggctgcggctgccagcaccgcggcgtatcatctaccgccgccggtgcatctgccacctccggttcacctgccacctccgggtcatctcccaccgccggtccacctgccgccgccggtccacctgccaccgccggtccatgtgccgccgccggttcatctgccgccgccaccatgccactaccctactcaaccgccccggcctcagcctcatccccagccacacccatgcccgtgccaaagccgcatccaagcccgtgccagctgcagggaactgcgtgntnggcagcaccccgatcctgggccagtgcgtcgagtttctgaggcatcagtgcagcccgacggcgacgccgtagctgctcgcctcagtgccagtcgttgcggcaagcgtgttgccagcagctcaggcaggtg

SEQ ID NO: 30740 - DNA, 551 bp, Zea mays
  Clone ID: LIB3180-061-P2-M1-F1.R2
gggtcttcagaccattagctttatctactccagagcgcagaagaacccgatcgacaccatgagggtgttgctcgttgccctcgctctcctggctctcgctgcgagcgccacctccacgcatacaagcggcggctgcggctgccagccaccgccgccggttcatctaccgccgccggtgcatctgccacctccggttcacctgccacctccggtgcatctcccaccgccggtccacctgccgccgccggtccacctgccaccgccggtccatgtgccgccgccggttcatctgccgccgccaccatgccactaccctactcaaccgccccggcctcagcctcatccccagccacacccatgcccgtgccaacagccgcatccaagcccgtgccagctgcagggaacctgcggcgttggcagcaccccgatcctgggccagtgcgtcgagtttctgaggcatcagtgcagcccgacggcgacgccctactgctcgcctcagtgccagtcgttgcggcagcagtgttgccagcagctcaggcaggtggagccgc

SEQ ID NO: 30741 - DNA, 563 bp, Zea mays
  unsure at all n locations
  Clone ID: LIB3180-017-D8-F5B
aaagccgtgaagaaaaaaaaaaagcgggactttggcacaactaaggcagataatatagggttggagggactattgcaggatttgaaaaactaagcaagggaaccgagccaacaaaatctttatatttgaagaagaaactgtgggaagatgaaaaggataagataggcaactttgtctcctcagccaacaccgacaaggtcaaagaatctccggtcaaacatgttntgccctccactggtatggctgctcatgctntagacgatctgtttgaagctgttgaactggaggatagacgtgacacatcaatagaaaatgatgctgatgacgaaactaggtcgcctgttatgcccncacaaccaccaccggtggttaatacttacgagcagtacgaggctgatgatgaggaagtcgacgtggaataagtagaatgccgagatggtactggaatgagctatatagctctcgcgcctgtgtaaagcattatgtaatatgtatttgatgctggagtttaccttgcatacaaagaatcgtcattaaatgatcttggtggatgcgggttaagc

SEQ ID NO: 30742 - DNA, 506 bp, Zea mays
  Clone ID: LIB3180-017-P2-M1-E8-F2A
gttactagaagtgcagctggtaccattgtaacatataacggggcgccctttagtatggacaatcaactcttaataaacgacatctaaaatatgttttttaaaaaaaggaaagattcctcaggcgccactatgtcatgcatgggtgatatatttattcaagatcttcaggccccgttcatgaccggcttcttcatctcccacgcggtgagacgggacaccttgacgtgcgccctcccgttgttgaacacgtaaaggcgagcgtccttgccgatggccagcgacgggtagaccctggagaggatgcaggtcttgcccccggctccgaaactctcaacgaccgaccggtcgatcaggcttctcagggatatcttgccgttcgagatgtccgtgtcgacaaatcctgcaaatgtcgggcggtacaggttcgggttcagggacgacttggtagggtcggtgcacatgagcaccacgggcttgtcgctgccggcggcgggcttgaacaccct

SEQ ID NO: 30743 - DNA, 545 bp, Zea mays
  Clone ID: LIB3180-017-P2-M1-E8-R2A
tatatacctctgtatgtgagtgaggccaatgagagccctcgtagtcgtaagtttcgcttcggcgtgcttgctgctgctgttgcagctcgcaggagcgtcgcatgtcgtctacaactacaaggacctcgaagccgaggctgctgcggcgacggaccaggtgccgccgtccatcgtcaaccccctgctcaggacggggtaccacttccagccccccaagaactggatcaatgatcccaacgcgcccatgtactacaaggggtggtaccatttcttctaccaatacaatcccaagggcgccgtatggggcaacatcgtgtgggcgcactcggtgtcgcgagacctcatcaactgggtggcgctagagccggcgctcagaccaagcatcccgggcgacaggtacggctgctggtccgggtcggcgacggtgctgcccgacggcggcggcccggtgatcatgtacacgggcgtggaccacccggacatcaactaccaggtccagaacgtggcgtacccgaagaacgtgtcggacccgctgctccgggagt

SEQ ID NO: 30744 - DNA, 310 bp, Zea mays
  Clone ID: LIB3181-001-P1-M1-A1
caacaagctgccccgcagcaacgaacacgaaccttggcagaacgaagctgaagtagttcgttgtgaacccagtatggcaaacgcgccgaggatcctggccctcggcctgctagcgctcctgtgcgctgccgccggcccggccgccgcgcagaactgcggctgccagcctaacttctgctgcagcaagttcggctactgcggcacgaccgacgcctactgcggcgacgggtgccagtcgggcccgtgccgctcgggcggcggcggcggcggaggcggaggcggaggcggaggcagtggcggtgcgaacgtg

SEQ ID NO: 30745 - DNA, 132 bp, Zea mays
  Clone ID: LIB3181-001-P1-M1-A11
attcggtgacggccgttgatgaggagcctgagttcaccacgcttgaatccgcacccatactactgctatctggccacgtaaagtaagtgtactgaccgccgttgtacatagggaagacaggggacaccgtgg

SEQ ID NO: 30746 - DNA, 267 bp, Zea mays
  Clone ID: LIB3181-001-P1-M1-A12
actcgttgacgaccggtgttgcggagccagggttaactacgattgaatgcgcaccgataattctgctgtcgggccatgtaaagttaatgtactgaccactgttgtacaaagggccgtctgggaacaccgtgtctatgccgagctgtacatgctgaaagaacaaccgattgtcgccctctcgtcgatgggcgaacaggtgaacacggatcgcagtttgaccaggaccaaagactgacatggcgcttcgggcggcagctgtaaaagagg

SEQ ID NO: 30747 - DNA, 150 bp, Zea mays
  unsure at all n locations
  Clone ID: LIB3181-001-P1-M1-A4
cagggaccggnccggaatatccgggcctactcttcccccccgccgcattaaaatttggggggggttttcatcaaaattagatatctaaaggtctcccttttagaaatacaaaangaaaggaaagaactgaaggatctcttacgacattct

SEQ ID NO: 30748 - DNA, 331 bp, Zea mays
  Clone ID: LIB3181-001-P1-M1-A6
gtggcttcccagaaataagaaagtacatttctagaaaaaaaaaaaaaaaaaaaaaaaaaaaaaaaaaaaaaaaataaaaaaaaaaaaaaaaaaaaaaaaaaaaaaaaaaaaaaaaaaaaaaaaaaaaaaaaaaaaaaaaaaaaaaaaaaaaaaaatataaaaaaaaaaaaaaaaaaaaaaaaaaaaaaaaaaaaaaaaaaaggggggcgccctttttaaaaaaaaaaattttttacccgggaaaacccgggtttaatttttttttattgggcaaaaaaaaaaaaataatttgccccgttttaaaaaaagggaggggggaaaaaaccttggt

SEQ ID NO: 30749 - DNA, 309 bp, Zea mays
  Clone ID: LIB3181-001-P1-M1-A9
tgcaataatatagaagggagtgaagcgtgtacacgtacggccctataatatatatagatagcaagacagagcattcccttgcaccaccacaaccagtcctcacataatcatcttcattcactcactctcttcgatcactgtactgaagataccatggccaagtcgaccgcgatgtttgtagccgccctggccctggtggtggtgatggcgacgacgagcacaggcggtggcagggcggcagcggcgtgcgatcccaagccgctggtggtgtgcgatccggcgttcatggacggagcgaaacccgcggca

SEQ ID NO: 30750 - DNA, 275 bp, Zea mays
  Clone ID: LIB3181-001-P1-M1-B1
tcgttgactgctaataatattgagccaggttgctgtaccaagccgtgcttacttattaacacagtatcaggtgctgcctttctaccagccggttgaggataacccaccatccctgttacaactacaacaattgttgccatatgtgcaacttgctttgacatacccaggaggcttgtaccaacaacacatgaataggagcgccgctgtttagattgcttattggtgcgaattgaataatatattgttttggctgatgtatgtgggcagctcagaaa

SEQ ID NO: 30751 - DNA, 317 bp, Zea mays
  Clone ID: LIB3181-001-P1-M1-B10
tcgatgacaatcgatgatgcggatcgtagagttaacaacgattcaatgagaaccgattatgctgatagctgatcatgaaaagttaagtgacggacaagtgttgtaataagggaactttggggccattgtgtctctgcggaggtgtccaggatgaaagaagatactcgttgtccgcactccggttgatgggtgaacaactcgacacgcgatggcagctctgaccgagaccaaagaagagactggctcttcgtgtggcgtacttaaaagcggagctagatgacacaagggggaggcttggcactggccgacctttacaa

SEQ ID NO: 30752 - DNA, 245 bp, Zea mays
  Clone ID: LIB3181-001-P1-M1-B11
tcgcaggctgcccgatggtcttgtcggtatttcactacggttccctcatctccgaccttgcttttgactgtccctacaaaattcttggccttatcaagggcttcaaccggacctttaatgtccattgtattgaccacagaggcacaacagagcatgcggcgaggacctgcacgctttaaaccgacggcgaagcgacgaccaggccatatgccatggtacaaggcctacaaggagaaagtttattc

SEQ ID NO: 30753 - DNA, 183 bp, Zea mays
  Clone ID: LIB3181-001-P1-M1-B2
tcgataaaggctaataacatagagccagggtgctatacctagccatccaaagcttatcgacacagaatcaggtgctgcctttctaccaccctgttcaggatttgctcacatcactcttgcttctacaacaatgtttgcctttctggcaactctcttagacacacccatcttgcttctaccaac

SEQ ID NO: 30754 - DNA, 305 bp, Zea mays
  Clone ID: LIB3181-001-P1-M1-B3
cagccacctaaacacatcaatattggccaatatatttattccaatgtacctagcctgaaggagttttgcgaaccagctacaaagttagaagaaggaacatcagccctgaaagcaatctccacagtgatgttgttattacagagatatgagtttaaagcaaaccacgaggagtgggttaacactgttaaacctaagcttggccttgatatctctactcgtgtgctacaagccgtgaattttgcacgggaaaacatcaaatctttgtacgcaataagaaatgaattgcgggctgcactcaagaatct

SEQ ID NO: 30755 - DNA, 275 bp, Zea mays
  Clone ID: LIB3181-001-P1-M1-B7
tcgcttatcaccaagcatcacaactggcaacttcatggcattcaaaagatagtggaggcagtgcaagtggctcatttgatcaaggcagcaacattattgatgagatcagacaaggtgctacaaaaagatttgccgttcctctagtaactaggagcacactagaagttgtcataccaaatagtgctgttgcaagcctcaccatgagagctggtagcaagcttgctcaaataagcgagatctctggtgctactgtaacgctagctgaggacagacct

SEQ ID NO: 30756 - DNA, 123 bp, Zea mays
  Clone ID: LIB3181-001-P1-M1-B8
attcgacatcctctggcaacttacttaaggtagtgccaacatatcaatggggatcgctcgggatagtggagttgcatcaataggggattggcggatcattctggtaaacagggggcttttggg

SEQ ID NO: 30757 - DNA, 228 bp, Zea mays
  Clone ID: LIB3181-001-P1-M1-C1
cggacgcgtggggccgttctaccagcacgctgcgcctaacgctggcaccctcttacaactgcaacaattgctgccattcaaccaacttgctttgacaaacccagcagcattctaccaacaacccatcattggtggtgccctcttttagatttcttatgagttatagttcaataataaagttttttgtctgatgtttgtggcttcccagaaataagaaagtacatttct

SEQ ID NO: 30758 - DNA, 298 bp, Zea mays
  Clone ID: LIB3181-001-P1-M1-C2
tcgctaaatggtagtagtatttagccagctagctgcagcaagccgtgcttccttcttgacacagcaacagttgctgcctttctaccagcagtttgcggctaaccccgcaaccctcttacaactacaacaattgttgccctttgtccaacttgctttgacaaacccagcagcctcctaccaacaacacatgattggtggtgccctcttttagattgcttattagttgtaattcaataataaagttttttggatgatgtatgtggccaaccagaaataagaagttacattttcagattct

SEQ ID NO: 30759 - DNA, 247 bp, Zea mays
  Clone ID: LIB3181-001-P1-M1-C3
ctcgctgactggtagtaatatggggcggggttgctgtaccaagccatgctaccttattaacacagcaacagttgctgtcattttaccaactggttgagggtaacccagcagcatttttacaactacaacaaattgttgccatcagtccaacttgttttgacaaacccattgttcaactaccaacaatagatgaacattggtgccgccttttagattgcttatcggtcgtaattcaataataaagttt

SEQ ID NO: 30760 - DNA, 251 bp, Zea mays
  Clone ID: LIB3181-001-P1-M1-C4
tcgcagaaaactagcaatgccctgggtaggttcatctcgattccaaccactcctggattccatttgattgacccggccgatccaaatcgaatctaatcagcagttttggagttgctaagggaaaaagaatagggaggggcattgataagtgctaaaaaggtgggagctactggtcacaaaggccagcaggaattactcatgcgagacatagtgattaacagcttgaggcagcaaagatggacaaaataaga

SEQ ID NO: 30761 - DNA, 294 bp, Zea mays
  Clone ID: LIB3181-001-P1-M1-C7
actcgttgaccaccggcgatgcggagcgagagttaacaatgattcaatcaggaccgatcatgctgctagctgaccatgatgagttagtgtactgacaactgtcgtaatcatggcccactggggccactgtgtctatgcggaggagaccaagcttaaagatcaacccgattgtccccgtcgctcgattgtgaacaaccgaaccggatcgtaccctcaccagacgaaagagaaatggccttcgggcgcagagttaaagcggacttagtcaccaaggcgatggtggcactgccgcca

SEQ ID NO: 30762 - DNA, 216 bp, Zea mays
  Clone ID: LIB3181-001-P1-M1-C9
ctgtcgtatagccgctggctagctagctagttgagtcatttagcggcgatgattgagtaataatgtgtcacgcatcaccatgggtggcagcgtcagtgtgagcaatgacctgaatgaacaattgaaatgaaaagaaaaaagtattgtcaaaagaagaaaccaaatgtaaaaatactatagataaacaaacaaattgaaacgaaatttaagcctcac

SEQ ID NO: 30763 - DNA, 354 bp, Zea mays
  Clone ID: LIB3181-001-P1-M1-D3
ctactataggcagagcagacccggccgcaaccaccgttaaggaatttgcaggacatcccactctcgcgagctggagtaattacgaacaggcccggaccaatcgcgcttcaaaacagttgctcagactgaatggccaatggaacccgccctgtatcggtgcattaagcgctacgggtgccatggttacgcacagcttgaccgctactatagctagcgttctagcgcccgactcttttacctttgttgtcttcctttttcgaaaacttagttgtttaaccctacaaagctctacatgcaaggctacctttagggttaccattatgagctttactgctccaacaatcaaaaaaacta

SEQ ID NO: 30764 - DNA, 307 bp, Zea mays
  Clone ID: LIB3181-001-P1-M1-D5
tcgcttatgtacaacaacaacaactactaccattcagccagctagctgctgtgagccctgctgccttcttgacacagcaacatttgttgccgttctacctgcacactgcgcctaacgttggcaccctcttacaactgcaacaattgctgccattcgaccaacttgctttgacaaacccagcagtgttctaccaacaacccatcattggtggtgccctcttttagattgcttatgagttatagttcaataataaagttttttttgctgatatttgtggcttcccagaaataagaaagtacatttctag

SEQ ID NO: 30765 - DNA, 100 bp, Zea mays
  Clone ID: LIB3181-001-P1-M1-D8
tctcctattcttcgaaacaaccagaacacgggggattatcacttttttcaaacaataccaataattctgatgacttacctcacaagttattttccttaat

SEQ ID NO: 30766 - DNA, 314 bp, Zea mays
  Clone ID: LIB3181-001-P1-M1-D9
accatctcgactcgtggggaagtttcgctctcgcgggggtcgacttcctagggttcgaggaacgtccgtccgtccgtccggggaaggtgcaggagggaggcggagatgatcgaggtggtgctcaacgaccgcctggggaagaaggtgcgggtcaagtgcaacgaggacgacaccatcggcgacctcaagaagctggtggcggcgcagacggggacgcgccccgagaagatccgcatccagaagtggtacaacatctacaaggaccacatcaccctcaaggactacgaggtccacgacggcatgggcctcgagct

SEQ ID NO: 30767 - DNA, 64 bp, Zea mays
  Clone ID: LIB3181-001-P1-M1-E2
ttctttttcgttttctaccaataatcaacagcgggggtttaatacacttccaacaaaaccgcta

SEQ ID NO: 30768 - DNA, 122 bp, Zea mays
  Clone ID: LIB3181-001-P1-M1-E3
ttcttcttctccgcctcatcttccttcttctcctccacctccggcgggggcggcatcggcgacagcagctcgaccttgcggccagtcttcttctgcacgcgctccaccaccttcatggggtc

SEQ ID NO: 30769 - DNA, 311 bp, Zea mays
  Clone ID: LIB3181-001-P1-M1-E8
aaaacatcagggcacaacaactacaacaacttgtgctagcaaaccttgctgcctactctcagcaacaacagtttcttccattcaaccaactagctgcattgaactctgcttcttatttgcaacaacaacaactaccattcagccagctatctgctgcctacccccagcaatttcttccattcaaccaactgacagctttgaactctcctgcttatttacagcagcaacaactactaccattcagccagctagctggtgtgagccctgctaccttcttgacacaaccacaattgttgccgttctaccagcac

SEQ ID NO: 30770 - DNA, 313 bp, Zea mays
  Clone ID: LIB3181-001-P1-M1-E9
cgggccggtggcggtggcggaggcgcggacgtgccagtcgcagagccacaggttccggggcccctgcctccgccggtccaactgcgccaacgtctgcaggaccgaggggttccccggcggcaggtgccgcggcttccgccgccgctgcttctgcaccacgcactgccactgattcgctcgcccagcggccggctggcgtcgccgtcgatcgcgcgcgtcgcgaccagtccatggctccatgcatgaataacaagggtgtgcggtttgtgatgccaaattgtatcctctcgtcgtgtgttgaagcgttcgatcg

SEQ ID NO: 30771 - DNA, 116 bp, Zea mays
  Clone ID: LIB3181-001-P1-M1-F1
gggcccgtggcggcggggggggttctgacatgccaatcgcaaaaacacaagttccggggcccctgtcttctgtcggtcaactgcgccaacgtctgcaagaccgaagggtatcctgg

SEQ ID NO: 30772 - DNA, 335 bp, Zea mays
  Clone ID: LIB3181-001-P1-M1-F4
agcgcgcagccgagcgtcgcgacgctccacaacgcgggcatcagtacgatgctgcgcacgcgttcgaagcggtcggcgagcaccgacagcggaaacgtcagcagcccgaccagcagcgcgacgacgccgctcaacgaaccgagctgcgtgtccgacagcccccacgcgtgcttgagcagcggaaacacggcgttgagcacctgccgcgacatgtagtccgacagcaatagcccgacggtcagcccgaacacgagccacgcatacgcgggcgcgcgccgctcggtggccgcccgatcctgcagcgacggctcgacatgatgaatcaacatgcgtgt

SEQ ID NO: 30773 - DNA, 154 bp, Zea mays
  Clone ID: LIB3181-001-P1-M1-F5
tcgcgtaaaagcaagttggctaaatggcagtagcccaccattggtggtgccatcttctagatttttttatgctttatactgtaataataaagttctcatactgatatgtgcaacttctcagtaacaaaagattagagatctatattttaagttc

SEQ ID NO: 30774 - DNA, 328 bp, Zea mays
  Clone ID: LIB3181-001-P1-M1-F6
tcgctcggcggcctgtacggcgacctcccgtcgacgacgttggacggcgatgaagacaaggtcttcacggattccgtttggtccagcgccaccaagatggcgccttccaccctccgcaagccgaccaccaccttcgccccacccccatctattctccggaaccagcacctgcgcccgcccaaagctcacctgcatacccgctccccccgtcgttgccgacgaacccgacccgggcacctgctttcagcccgcgttcgtcgctgtccagtccaccgtgctggaggagtacgaccctgccaggcccaacgactacgaggactaccggaag

SEQ ID NO: 30775 - DNA, 205 bp, Zea mays
  Clone ID: LIB3181-001-P1-M1-G10
gagaggaaagccggccgccggacctgcccgtcactacttgctggatcctcttcttgcggtggtcaaccaacaacccatcggggggggtgccctcttttagaccgcccatgagttattgcccaataatgaagctttttggatgatggttgcggcgatccacatataaataagcacttttttagaaagaacattttctagaacttac

SEQ ID NO: 30776 - DNA, 250 bp, Zea mays
  unsure at all n locations
  Clone ID: LIB3181-001-P1-M1-G11
gaggcaacaagaacgaacccacgcgaacgccaaagttcgctttgcttggttcgggccgctgcaccgccattgttgatctgttctccttctccttggaggagaaagaagagggggagaggaatgatggggcggacgagcgtggcggcngcngcngcccttctggtgctggcggcgtgcgcggctcttcccgcgaggaccgcggcgaacaagatcagcattaactggaagcccaacgtggactacaacgact

SEQ ID NO: 30777 - DNA, 318 bp, Zea mays
  Clone ID: LIB3181-001-P1-M1-G12
tccaccgctctcctccccaatcagctatgctcgcccaccgcttcctcctcctcgtcgtcgtcgccgcggctgcggcgagcggcatcgcctccgctaagccgacggcgtacgaagccctcgccgactacgacttccccccggggatccttcccaagggcgtggtcgcctacacggtcgacaacgccacgggcgccttcacggccacgctcgatgcctccgcgtccggcgcgggatcctccatctgcgagttctccatcgagggctcctactcgctacgctaccagaccaagatcaccggcaagatcttccccgaccacc

SEQ ID NO: 30778 - DNA, 316 bp, Zea mays
  Clone ID: LIB3181-001-P1-M1-G2
tcgcaacaagcaacatagaaagtggaatccagtagcaacaatagagcaacaatggcgaccaagatattttccctccttatgctccttgctctttctgcatgtgttgctaacgcgacaattttccctcaatggtcacaagcttctatagcttcccttctttccccataccttccatcaatgatagcttcagtatggggaaacccaacttttcaaccctataggctccaacaagcaatcgcagcaagcaacatacctttatcacccttggttcaacaatcgccagccctatctttggtgcagtcattggtacaaacca

SEQ ID NO: 30779 - DNA, 247 bp, Zea mays
  Clone ID: LIB3181-001-P1-M1-G3
tctagcgtacccaagatgacacatacaaagcggcgacgtcgtatatcatttatacaacaacgtaaatcaaaataactggcctacttatgcacaacgggcttgactgcataaactgttaacgtgcccatcttaactgaatggtcacacattcctatttcgtccacttaattatctattcattacatcaatgccagctgcagtatgcaacaacccagctcttcaaatgtataagctcacacaagctata

SEQ ID NO: 30780 - DNA, 323 bp, Zea mays
  Clone ID: LIB3181-001-P1-M1-G4
gcattcagaaacacaccaagcgaagcacattagcaacaacctaacaacaatggctaccaagatattatccctccttgcgcttcttgcgctttttgcgagcgcaacaaatgcgttcattattccacaatgctcacttgctccaaggtccattattacacaagtccttccaccaggtacttcaatgggcttcgaacacccagctgtgcaagcctataggctacaacaagcaattgcggcgagcgtcttacaacaaccaatttcccagttgcaacaacaatccttggcacatctaacaatacaaaccatcgcaacgcaacagcaac

SEQ ID NO: 30781 - DNA, 334 bp, Zea mays
  Clone ID: LIB3181-001-P1-M1-G6
gggtgaagaaacgggggatgtgaggctgtccgttgaggccatcttgggcgcgtctcctgttcgtgtcgtgtacttgttgtccggcggccgtcgggccgccgccgtgcgaatcgctgcattgtactggcaggtacatccggaacgcgtgcgcgcgcgaagccgggccggcgattcggccccccggtttccgcgccggattatgtgtaaattgcgtaaccgtctgtcggatctgaaagggttgcccggcgagcatcggtcatcgcgcgcccgggtcgggagcgacgccagcccggtcaagcggggcgcgcggcgcgatttcatgcctgcccgcacc

SEQ ID NO: 30782 - DNA, 316 bp, Zea mays
  Clone ID: LIB3181-001-P1-M1-G7
aagcaacatagaaagtggaatccagtagcaacaatagagcaacaatggagaccaagatattttccctccttatgctccttgctctttctacatgtgttgctaacgcgacaattttccctcaatgctcacaagctcctatagcttccctttttcccccataccttccatcaattatagcttcagtatgtgaaaacccagctcttcaaccatataggcttcaacaagcaatcgcagcaagcaacatacctttatcgcccttgttgtgtcaacaatcgccagccctatctttggtgcagtcattggtacaaaccatcag

SEQ ID NO: 30783 - DNA, 325 bp, Zea mays
  Clone ID: LIB3181-001-P1-M1-G8
tttttctcgtacgaagcatcatacaaagcggggggtatttgcaacaatagagcaacaatggataccaagatattttccctccttatgctccctgctctttctacatgtgttgctaacccgacaattttgccttaatgtttacaagcttctatagcttccctttttcccccatacctttcattaattatagcttcaggatgtgaaaacccaattctttaaccattttggcttcaacaaggattttcagtaagcaacataccttttatcgcccttgttgtgttaacaattgccagcccctatttttggtgcaatcattggttacaat

SEQ ID NO: 30784 - DNA, 323 bp, Zea mays
  Clone ID: LIB3181-001-P1-M1-G9
tcgacaaggcaaagaagatcaccgcggacgaatacatcagtgccatcaaggaagaaatcagctaaggttgtcaagatccaaaaggagcttgacattgatgtgcttgtgcatggagagccagagagaaatgacatggttgagtacttccgtgagcaattatctggttttgcgttcactgccaacggatgggtgcaatcctatacgatcacgctgtgtgaagccacccattatctatggtgatgtcagccggccgaaccctatgactgttttctggtccaagatggcacagagcatgacctctcgtgccatgaacggaatgttga

SEQ ID NO: 30785 - DNA, 63 bp, Zea mays
  Clone ID: LIB3181-001-P1-M1-H10
aatgaagttttttggatgatgtttgtggcttcccagaaataagaaagtacatttctagattct

SEQ ID NO: 30786 - DNA, 325 bp, Zea mays
  Clone ID: LIB3181-001-P1-M1-H11
ctctctctcgtggagacgactgggcgaccgccggcgccgacctacgccaggtgcccaagccttagacgggaccatcgccgacgacgagcactcacgagtcagaaatgtcttcagtcgggagcggcagtggcaccagggctgcgaatggtgcagctgccatcagtgctgccgcgacggcagcaggctcggccgacgccagattccacccccaactactacagcaggacaggcaaagtagatgggctggctgcttttcaggcttatcatgtttcggatcgcagaagggcgggaaaagaattgttcctgcagcacgtacttctgatgg

SEQ ID NO: 30787 - DNA, 324 bp, Zea mays
  Clone ID: LIB3181-001-P1-M1-H12
cttatcaccaagcatcacaactggcaacttcatggcattcaaaagatagtggaggcagtgcaagtggctcatttgatcaaggcagcaacattattgatgagatcagacaaggtgctacaaaaagatttgccgttcctctagtaactaggagcacactagaagttgtcataccaaatagtgctgttgcaagcctcaccatgagagctggtagcaagcttgctcaaataagcgagatctctggtgctactgtaacgctagctgaggacagacctgacatcttagagaaagttgttcgaatatctggtacccctgagcaggctagca

SEQ ID NO: 30788 - DNA, 126 bp, Zea mays
  Clone ID: LIB3181-001-P1-M1-H2
ggtgttgcatttcattcggaaaaccccagcatgggtaatagggaggaggtccgtaccgtagggcaataccaacacctaaaccccctggatggagaataggacccgccctgtaaaggttcttttagc

SEQ ID NO: 30789 - DNA, 316 bp, Zea mays
  Clone ID: LIB3181-001-P1-M1-H3
gcagcattgaagtttgaggataatgagcagcaaaagagatatgtaaagatctcatttagagaaatacaagatgaagttaaagaacttaaggatctcttggacattctgcatgcacctgtggtttatgcacacaatgacttgctttcaggaaatctgatgctcaatgatttggaagggaagctatattttattgattttgagtatgggtcatacagctaccgtgggtatgacattgcaaatcatttcaatgagtatgcaagatttgactgtgactataatttgtacccagataaagatgcccagtatcacttcttta

SEQ ID NO: 30790 - DNA, 89 bp, Zea mays
  Clone ID: LIB3181-001-P1-M1-H5
ctcttttagatttcttatgagttatagttcaataataaagttttttatctgatgtttgtggcttcccagaaataagaaagtacatttct

SEQ ID NO: 30791 - DNA, 315 bp, Zea mays
  Clone ID: LIB3181-001-P1-M1-H6
cggaattgcaattctcggcccacgcttccgctctcttattatttcttgtgagcgactgggcaataataaagcctttcatctcatggttgccactccctagaaataagcatgtacatttctaagcacttaaaagggagaaatgaatttagttcggagggggggtggtatcaaggatgcaaattgaggaacacttatatgcgacgtcctaactgttgtatagtgttgcctacaccagatttcatccccactacttcacaaagtcaggcctggtaaatgggcttcttgctcgttagcttaggacagacctgacatctt

SEQ ID NO: 30792 - DNA, 317 bp, Zea mays
  Clone ID: LIB3181-001-P1-M1-H9
gcagcattgaagtttgaggataatgagcagcaaaagagatatgtaaagatctcatttagagaaatacaagatgaagttaaagaacttaaggatctcttggacattctgcatgcacctgtggtttatgcacacaatgacttgctttcaggaaatctgatgctcaatgatttggaagggaagctatattttattgattttgagtatgggtcatacagctaccgtgggtatgacattgcaaatcatttcaatgagtatgcaggatttgactgtgactataatttgtacccagataaagatgcccagtatcacttctttag

SEQ ID NO: 30793 - DNA, 355 bp, Zea mays
  Clone ID: LIB3181-002-P1-M1-A1
ctcctctccgcacataccctccctacctcgccgtcgccgtcgcatctgccatgggggcgtacaagtacgtctcggagttatggagaaggaagcaatccgacgtgatgcggttcgttcaacgcgtgcgctgttgggagtacaggcagcagccggccatcgttcgcctcacaaggcccacccgccccgacaaggcccgtcgcctaggattcaaggccaagcaggggtatgttgtttaccgcgtccgtgtgaggcgtggtggcaggaagaggcctgtgccgaacggtattgtctatggcaagcccaagcaccagggtatcacccagctcaagttccagaggaacaagagatctgatgc

SEQ ID NO: 30794 - DNA, 343 bp, Zea mays
  Clone ID: LIB3181-002-P1-M1-A10
ctccgctccgcatccacagccccgtcggcggccagggcccagcctctcccctccgccgccgcgccacgccgcatcccagcgcgactttcggttgccgcgggcgggggcgagcagcagctcgtcaccgcgcaggaaccggcgcacgcagaacctgattatggagttgtcagcattcaccatgtcgggatcctgtgcgagaatcttgagaggtcactggcgttctacaaggacctactgggtctgagggtgaatccagctcggccaaacgacaagctcccgtacaggggcgcttggctctgggtgggttctgagatgatccacctgatggagctgccgaatcctg

SEQ ID NO: 30795 - DNA, 192 bp, Zea mays
  Clone ID: LIB3181-002-P1-M1-A11
ttttcgtccgtacaataatatagaagagggggaagcgtttacacatactgcctcacaatatatatagatagtaattacacaacataaattagcaccacctctaccatttctcacataaccatttaaattcactcactttcttacatcactgtactgaagataccatggccaaatctaccgcatatttttgta

SEQ ID NO: 30796 - DNA, 280 bp, Zea mays
  unsure at all n locations
  Clone ID: LIB3181-002-P1-M1-A12
ttttcgtccgcgcaanaatatagaagggggggaggcgtgtacacgtactgccctatcctatatatagatagcaagacagatcattaccttgcaccaccacaaccagtcctcacataatcatactcattcacttactctcttacatcactgtactgaagataccatggccaagtacaccgcaatgtttgtagccgccctgtccctgaaggtggttatggaaacatctagcacaagcagtggaatgggcgcaagcaacatgcgatcccaagcccttgttggt

SEQ ID NO: 30797 - DNA, 77 bp, Zea mays
  Clone ID: LIB3181-002-P1-M1-A4
tttcattttttttttctatctacataccttgccaacggggatttctccttaacatatcacatttcctcttacaaaat

SEQ ID NO: 30798 - DNA, 348 bp, Zea mays
  Clone ID: LIB3181-002-P1-M1-A5
gagcattcagaaacacaccaagcgaagcacattagcaacaacctaacaacaatggctaccaagatattatccctccttgcgcttcttgcgctttttgcgagcgcaacaaatgcgttcattattccacaatgctcacttgctccaagttccattattacacagttcctcccaccagttacttcaatgggcttcgaacacccagctgtgcaagcctataggctacaacaagcaattgcggcgagcgtcttacaacaaccaatttcccagttgcaacaacaatccttggcacatctaacaatacaaaccatcgcaacgcaacagcaacaacaattcctaccagcactgagc

SEQ ID NO: 30799 - DNA, 103 bp, Zea mays
  Clone ID: LIB3181-002-P1-M1-A7
aagccttccgtaattcaataataaagatttttggaaatgtaactttttatttctggttggccacatacatcatccaaaaataaaaagttacatttccagattt

SEQ ID NO: 30800 - DNA, 350 bp, Zea mays
  Clone ID: LIB3181-002-P1-M1-A9
tgcaatgatatataagggggtgaagcgtgtacacgtacggccctatcatatatatcgatagcaagacagatcattaccttgcaccaccacaacacagtgctcacataatcatattcattcactcactctcttacatcactgtactgaagataccatggccaaatacaccgcaatgattgtagccgccctgtccctggaggtggcgatggcaacaactagcacagagcgtggcagggcaggcagcagcatgcgatcccaagccgttggtggtgagcgatccggcgttcatatgactgagcgaaacacggggccacacgctgatgcacacatcagtgcgcaggacgcatgct

SEQ ID NO: 30801 - DNA, 330 bp, Zea mays
  Clone ID: LIB3181-002-P1-M1-B10
gatgcctactccgcccagaatgaggctattgacccgcggcagcgcctgcggctactggccctgtagaccattgaactcgacatggatccccattctatgcgcaaccacctcggcagttactagtgcaagctgtgcctgactctcaacaacatctaggggaactacctagcccacacgcatgggaagaggcaccagaccaacctgtccaagcgcgccgcccgagaggacaaggatgcgcccgcgcaggcccaagccaacaagcgcaagcttgccccccgcacgtctgttaagattggcagaccctggtataaagttaccaaacaatatgat

SEQ ID NO: 30802 - DNA, 336 bp, Zea mays
  Clone ID: LIB3181-002-P1-M1-B11
aaactctactctgcgaacagtgtagtctacagtgcaaaacaatgcatgtgggtaaattttaggtaatttgctggagtcgacctgatcgaccaacctcattgtgctttatgtgggaatgactgcatgccctttcccttgtcttacatatatatatttttttgttagttgagtctgtaatatggtaaatttattttgtctgaaagtatgcctgtaatacatgaccatattacgaaattgtcccgtaggtgaagttttttatatgaccatagatattaccacattggagattataatcctatatttctccgtaattcaacattcacaaaggtatataca

SEQ ID NO: 30803 - DNA, 230 bp, Zea mays
  Clone ID: LIB3181-002-P1-M1-B4
tttatgcttaccgacccacgcatgcgacggggtaggtctgctatagcggtacctaaattcaatacattgggcgacgttaaacaacctcttgactgtgagaaccacagcataacgcatcttaaaccccatgcattacctacctatttcgtcagatggcgtattacccaccaggcccgttcctaactcactatccgacagttgcccaaccttaatgtgcaatggatcgcacc

SEQ ID NO: 30804 - DNA, 346 bp, Zea mays
  Clone ID: LIB3181-002-P1-M1-B8
tcgatatcctctggtatcttagttaaactagtacgagcatatcaatgcggctcgcccggactagtggagtttcaccagaagggatttgatggatccttgtgctacacggtgtgctcttgcaatactctgacgaatttgaactgaacgcccttgccggccatgacatgtgcgacatcaagtgccataatcacaaggaccccaccagaaggcagctacacgaggatcaaagccataatcgcgagcaccatgacccttgcagagagtcatgcaagatgaagtgccgagaccatcacgaccgtgcaaggaaagagatctgccaacagcatagcatgagctatggtctcag

SEQ ID NO: 30805 - DNA, 266 bp, Zea mays
  Clone ID: LIB3181-002-P1-M1-C1
tttttgacgcgtaagtcctttctgccagcgggctattcttaaccctggcaccctcttacaacttgaacaattgctgacattcaacacaactggctttgacaaacccagcagcatttctaccaacatccgatcattgctggtgccctcttttagatttcttattagttatagttcaataataaagtttcttgtcttatgtttgtggttactcagaaataagaaattacatttctctaaaaaaaaaaataaaaggtctgtccttctat

SEQ ID NO: 30806 - DNA, 303 bp, Zea mays
  Clone ID: LIB3181-002-P1-M1-C11
ctgactctgtcgaactctgctgcgtacctacaacagcgacaacagttacttaatccattggtagtggctaacccattggtcgccgccttcctacagcagcaacaattgctgccatacaaccagttctctttgatgaatcctgtcttgtcgaggcagcaacccatcgttggaggtgccatcttttagattacatatgagatgtactcgataatggtgccctcataccgacgtgtgtttcctagaaataatcaatatattgattgagatttatctcgatatatttctgaactatgttcatcatat

SEQ ID NO: 30807 - DNA, 342 bp, Zea mays
  Clone ID: LIB3181-002-P1-M1-C12
gatgaagatgaaatgtctgaggaagatgactccagtgatgaagatgaaatgtcaggtggtgctgatcctagtgatgattccagtgatgaatctggttcagaacatacttctgccccaaagaagactgatgtagtagttggcaagaagagagcaatcaaagctgaggcaccttatggtaagaaggctaagtctgaacaatcttctcagaaaacaggtgacaaggcttcaacttctcatcctgcaaagcagtccatcaagactcctgcagacaaatctaggaagacccccacagctgacaagaaatcccccaaatctgggagccatggctgcaagtaacgcaac

SEQ ID NO: 30808 - DNA, 335 bp, Zea mays
  Clone ID: LIB3181-002-P1-M1-C4
tcgtagcaaactagcagcgccctgggcagttccgtctcgttcccaaccactcctggattcgattcgactgacccgtccgctccaaattgaatctaatcagcagttttggagttgctgaagggagaaagtgagaggagaggggcatggatcaggtgctcaacaaggtggggtgcttctggttcagcaaatgggccagtgaggaaatctactacattggcgactacattagttcgacctgaagcagtattggtgggtcagccaaatggatgttgatcaaattttaatttatgatgcattaagcactgcctgatcttcttaaggaatatgacattgcc

SEQ ID NO: 30809 - DNA, 350 bp, Zea mays
  Clone ID: LIB3181-002-P1-M1-C8
ctagctctctccagggatcggattcggatcaccatgccgtccaccgtgaactccgcgtccctcgaccagaaccttgagctcgccaagcaatgctcgcgagaggccgccctcgcagggttcaaggcagcagctgtcgcgaccgtcgcctctgcagttcccaccctggttagcgtcaggatgctgccatgggccaaggccaacatcaaccccgctggccaggccctcatcgtctccacagttgctggcatggcgtacttcatcgcggcggacaagaagatcctctcgctggcgaggcagcactcgtacgagaacgcgccggagcacctcaaggacacctccttccagggcac

SEQ ID NO: 30810 - DNA, 342 bp, Zea mays
  Clone ID: LIB3181-002-P1-M1-D11
attcggccgcttccgccctcgcctccgctgccttctccacgccgctggcatgtcttccgacgccgtattcggctctgccccaagccccagcttcgccactggggaacaggcgaaggcgggcccgctcccgcactctaccctggagatcgcgggcgcccgacgaagccttctctccggcttggtcagtctgcgaacaccgtaccgcgcatttcccgtactacgcgtacaaccagacacgtctgaaccatcttggctgcgctcacgcgatcgatcccggccgctaagctgcggagctagtgcctgcgcgcccctgacgacggagccgacgcgctcgactgggtc

SEQ ID NO: 30811 - DNA, 299 bp, Zea mays
  Clone ID: LIB3181-002-P1-M1-D2
gacataccaaaggacgtcactgaagagccacgggctctgaccctccttgggccatctctgacgacggcgccgctgatgccttggatgcgtatgaacttcttgcgcgtagccactggaggaggggtcaggcagcagaaccaagtatactgggcgaagaagacgagaaggggccgtgacgacgtggacgaagagcgaatagacacgcacagttttaacaaaaaggcgagcgagaaaacccagctgttccccaaggtaatcctgcttaaaaagaaaacggtttgagaggatggccaagtatc

SEQ ID NO: 30812 - DNA, 365 bp, Zea mays
  Clone ID: LIB3181-002-P1-M1-D3
gccgaagcgcttcagttcggtgcgcaggaacgcgtcgtccgacagctggccgtcggtgtactgcggcgcgtacttctggatcgcctgcgtgatcgtcaggcgatggaacggcttcgcgaggtcgagttcacggccttgatattgaatcgtcgcggtgccgagcgcgtcgatcgccgcctggcggatcagctgctcggtgaagtccatcagccagcggtagtcggtgtacgcggcgtagaactccatcatcgtgaattccgggttgtgacgcggcgacacgccttcgttccggaagttgcggttgatctcgaacacgcgctcgaagccgccgacgatcaggcgcttcaagtacagctccggcgcgg

SEQ ID NO: 30813 - DNA, 349 bp, Zea mays
  Clone ID: LIB3181-002-P1-M1-D4
tagcaacatacatagtgaagtacactagcaacatcttagcaccaatgggagccaagatttttgccctccttgccctccttgctctttcagcaagcgctgctacctcgacttttattccacaatgctcacaacaatacctctctccggcgacagccgtgggatttcaatacccaactatacaatcctacatggtacaagaggccatccaagcaagcatcttacggtcattagcattaaccctccaacaaccatatgctctattgcaacagccatccttagtgcatctgtatctccaaagaatcgcggcacaacaactacaacaacagttgctaccaacaatcaatcaagg

SEQ ID NO: 30814 - DNA, 378 bp, Zea mays
  unsure at all n locations
  Clone ID: LIB3181-002-P1-M1-D8
cgcgcagnccgcgcttccctgcgcgccgccaggccgtcgctcgatctcgtggcccgcgtctcgctcgccgccaggccctaaggtcagcgccgtctagccagcaccgtcttgccgtcgtgaggtactgaggnaatttttcntggtatatcagcatggcacctgtcatcaagtgtttacagagaataacatgtgaaagatttgtacctccaagggtttcaagtctatatccagtgctaccagagttatcntggtggactataacatgatantttaggcgctggtgccacgaaaaggactgtctggatcaacaaaaaatggtcgcgattccaatccaaagtatttgggggtaaagaagtttggtggagagaaagtactacc

SEQ ID NO: 30815 - DNA, 341 bp, Zea mays
  unsure at all n locations
  Clone ID: LIB3181-002-P1-M1-D9
accatctcgactcgtggggaagtttcgctctcgcgggggtcgacttcctagggttcgaggaacgtccgtccgtccgtccggggaaggtgcaggagggaggcggagatgatcgaggtggtgctcaacgaccgcctggggaagaaggtgcgggtcaagtgcaacgaggacgacaccatcggcgacctcaagaagctggtggcggcgcagacggggacgcgccccgagaagatccgcatccagaagtggtacaacatctacaaggaccacatcaccctcaaggactacgaggtccacgacggcatgggcctcgagctctactacaactgagccgncgnccctct

SEQ ID NO: 30816 - DNA, 353 bp, Zea mays
  Clone ID: LIB3181-002-P1-M1-E1
ataggagcttgtgagcattgaggcttcaacaagcaatcgcagcaagcaacatacctttatcgcccttgttgtgtcaacaatcgccagccctatctttggtgcagtcattggtacaaaccatcagggcacaacagctgcagcaactcgtgctacctgtgatcaaccaagtagctctggcaaacctttctccctactctccgcaacaacaatttcttccattcaaccaactgtctacactgaaccctgctgcttatttgcagcaacaactattaccatttagccagctagctactgcctactctcaacaacaacaacttcttccatttaaccaattggccgcactgaaccccgct

SEQ ID NO: 30817 - DNA, 330 bp, Zea mays
  Clone ID: LIB3181-002-P1-M1-E10
gaaggtagcagggctcacaccagctagctggctgaatggtagtagttgttgctgccttcttgacacaaccacagttgttgccgttctaccagcacgttgcgcctaacgctggcaccctcttacaactgcaacaattgctgccattcaaccaacttgctttgacaaacccagcagtgttctaccaacaacccatcattggtggtgccctcttttagatttcttatgagttatagttcaataataaagttttttatctgatgtttgtggcttcccagaaataagaaagtacatttctagattcttaaaaaaaaaaataaaaaattatttttt

SEQ ID NO: 30818 - DNA, 353 bp, Zea mays
  Clone ID: LIB3181-002-P1-M1-E2
gcgtcgtcaacgcttcttccttcccgcggtctcctcttcgcctctcggatccggcggccatggcgaggaaccccggctgcaccgtcttcataggtaacttggatgacaaggttcctgagagggttctatatgaaattcttattcaggtaggtcgtgttgtagacctacacatacctcgtgacaaggaaactagccgaccaaaaggttatgcttttgctgagtatgaaacagaggagattgcccagtatgccattaagctattttctggccttgttcgacttcataataaaacacttagatttgcgatctctgggcaagacaaaccctcattaaatggcaatattcctgtaact

SEQ ID NO: 30819 - DNA, 86 bp, Zea mays
  Clone ID: LIB3181-002-P1-M1-E3
ttttcttcttctacgcctcatcggggctgggggattctatctgccgctgggacccaaccgccatcagcaggtagatcttgtggaca

SEQ ID NO: 30820 - DNA, 352 bp, Zea mays
  Clone ID: LIB3181-002-P1-M1-E5
tcgcgaaaacgaaaataccgagtcgagtcagcgatgaatcccttcgccaaaaaaccaacaccgcgagaggtgatgcggagcagcaagcgggacctgacgaatgctacgcgagggatcgagagggacattgcgtcattacagcaggaggagaagaaactcgttgctgaaattaaaaggacagcaaaaactggcaatgaggcagcaacgaaaattctagcccgtcagctgatcaggttaaggcagcagatttctaatttgcaaggtagccgagctcagattcgggggattgcgacacatactcaggtgaaattttctttttttttgctttattcaatgttgattgtcaggttat

SEQ ID NO: 30821 - DNA, 357 bp, Zea mays
  Clone ID: LIB3181-002-P1-M1-E8
gaagctggcgcgcatgccggtaccgttaacgaatttccccgccgctctagaaaatgcaagatcacctacgattccatgcgagagtataccattattatagcagcacctataatgattttacttgaccctgatgagcaacggtccgaccaactaaactaatcatggacctaacttaacattgttgctgtacataggagtttatgccgaaggagtaactgattgccggcctgcactggttgggctaacaaacagaacgcgcaatctgaatctgaaatggacacaaagaacgaactggcgctattaatggcagagcttgtagaggagcttgatcacacgaggcctaagcttggcactggc

SEQ ID NO: 30822 - DNA, 54 bp, Zea mays
  Clone ID: LIB3181-002-P1-M1-E9
ttatcatgtgtggtatgaccaataatatatgcatcataataaagttttggtttt

SEQ ID NO: 30823 - DNA, 352 bp, Zea mays
  Clone ID: LIB3181-002-P1-M1-F1
atcgaaacagtccaaactaacttcaacactgtgaggacagggcgtgcaagcccggcaatgcttgaccggatcgaggtcgagtactacggaactccagtgaacttgaagagcattgcacagataagcactccagatgcaacttctcttcttattcaaccatatgataagtcaagcctcaagcttattgagaaaactatagttgccgcaaatcttggtgtgacaccaagcaatgacggagaagtgatacgagtgactgtcccaccgttgacatctgatcgcagaaaggaattagcaaagacagtggctaaattggctgaagatggcaaggttgctataaggaacataagaagag

SEQ ID NO: 30824 - DNA, 342 bp, Zea mays
  Clone ID: LIB3181-002-P1-M1-F10
gcaacatagaaagtggaatccagtagcaacaatagagcaacaatggcgaccaagatattttccctccttatgctccttgctctttctgcatgtgttgctaacgcgacaattttccctcaatgctcacaagctcctatagcttcccttcttcccccataccttccatcaatgatagcttcagtatgtgaaaacccagctcttcaaccctataggctccaacaagcaatcgcagcaagcaacatacctttatcacccttgtttcaacaatcgccagccctatctttggtgcagtcattggtacaaaccatcagggcacagcagctgcagcaactcgtgctacct

SEQ ID NO: 30825 - DNA, 342 bp, Zea mays
  Clone ID: LIB3181-002-P1-M1-F11
gcgtcctgcaggagcaggagcgggcgtacatgttgctccggatgaacgggagcggtggcgagggcagcgactacgggagctctgatgcagggagctacgagtacgacgaagagggagatgactacgaagaggaactggagcaccacctccgcgtccaccaccacgaacacccctcgggcgatggtgatggagagggagagggcgagggcgccgaggggagcgattacgacgaagagtacgaggaggacgaagaaggggagccggaagtagatcccgcggagtttgagaacgatgaggcttatgcgcgtgcgctgcaggatgctgaggagcttgaggtcgccg

SEQ ID NO: 30826 - DNA, 135 bp, Zea mays
  Clone ID: LIB3181-002-P1-M1-F12
gcgatcttcaggaggaagggggagttattctctatatccccatcatcatcccttttactgatgtcagagcatactgtacttcttaaacaaaaaccttctataacaattgataataacataactttaactttttac

SEQ ID NO: 30827 - DNA, 346 bp, Zea mays
  Clone ID: LIB3181-002-P1-M1-F2
gcgccacatccccaccgcgtccgcgtcgccggccatactccatcgcgaacgagatcacgggctggtttcgcgggccgaccatggggacgctcatccggccggggcccgccgcgtcgcctctccccatcgcttccccctcctcctcatccgcccacgtggctgtcgttggcggtggtgcgaggagcttgcggcatcgggtgtcggtggcggtggcggtgttccggtccccgagtacgcaggttctggcgacgagatggcgccgccggagaggtatggttgtgcggtcggatgtcgtcgccggtggcgcaaccgccgcggcagctggggattcgacgcgggcgctccc

SEQ ID NO: 30828 - DNA, 350 bp, Zea mays
  Clone ID: LIB3181-002-P1-M1-F3
gaccaactagcaacatagaaagcacaatagtgtaccaacaatggcagccaaaatattttgcctccttatgctccttggtctttctgcaagtgctgctacggcgaccattttcccgaaatgctcgcaagctcctatagcttcccttcttcccccgtacctctcaccagcggtgtcttcggtatgtgaaaacccaattcttcaaccctacaggatccaacaggcaatcacagctggcatcttacctttatcacccttgttcctccaacaatcatcagccctattacatcagttacctttggtgcatttattggcacaaaacatcagggcacaacaactacaacaacttgtgc

SEQ ID NO: 30829 - DNA, 333 bp, Zea mays
  Clone ID: LIB3181-002-P1-M1-F4
tttcgtttttaccaactagcaacatagaagggacagggggtgtaccaacaatggcagccaaaatattttgccttcttatgctccttggtctttctgcaagtgctgctacggcgaccattttcctgaaatgctcgcaagcttctatagcttcccttcttcctccgtacctttcaccagcggagtcttctgtatgtgtaaacccaattcttcaacctttcatgatctaacttgcattcacagtttgcattttacctttatcaccctttgttcctccaacatttcaacagccctatttcatcagttacctttggtgcttttattggcacaaaacat

SEQ ID NO: 30830 - DNA, 326 bp, Zea mays
  Clone ID: LIB3181-002-P1-M1-F5
ttttcatttttgctaaagcaaccttgctagggggggggggaccaccattgttagcaccactttctacatttatttaagctctacacatgttaaaattttttcaccacactgatacttgcttcatttctttgcctaaatgctttcaagctataattgctgcccaattattccctaacctgttcatccattattagcttattcatgcgtaaacccagcttcttaaccctatatgctccaacaagcaatcccaacaagcaacatacctttatcacccttgtttcaacattcgtcagccctatctttggtgcagtcattggtacaaacca

SEQ ID NO: 30831 - DNA, 148 bp, Zea mays
  Clone ID: LIB3181-002-P1-M1-F6
tcttcgtcgagacgtctgagagcaaggttactcacttgattcaagtaaacactatcgtaagtgtgacctaaactacagtagctgtcacgcgggtgctacgagtcgactgagagggcgatgacttcccagaggtacttgggctccaact

SEQ ID NO: 30832 - DNA, 347 bp, Zea mays
  Clone ID: LIB3181-002-P1-M1-F7
caaatttgctcaaacaatagttaaacttggtatggagtcataacatggtcctggttggtcgagataaaaagtttagatgattataaagaagtatgaatataggtgcttcaaaaatggacacttctcactgtacgtttcatatcattgaactacaacttcacatcttgagctatatttgtaactttttttatgttttttgcctcaaaagtgcaccaagtgttcatctaactgttatagacttaattcatgtaaagatgtccctattttggaccatttactaatttatatgcttcaaatgcctttccaagcgaaataaataaataaatgccaaatgtgctcaaaaatag

SEQ ID NO: 30833 - DNA, 190 bp, Zea mays
  Clone ID: LIB3181-002-P1-M1-F9
gggcgctgtgggatcatggtagatttatgctctgcatgccgcgtatcatgccatgaacttaggggagagcaatctgtgctgctgaaatcaaaacccttgtgaacgtttgttctgaacataactggaactctgcatttgcttgtatgacatgcgtatggttcaggaagtttaattccaatatttggtcact

SEQ ID NO: 30834 - DNA, 87 bp, Zea mays
  Clone ID: LIB3181-002-P1-M1-G12
tcgttgaccaaaaagagtagaaaggggattttatggtccactgaatcctccaagtcgacgtcgaagaagaggcaacggaaagcggca

SEQ ID NO: 30835 - DNA, 203 bp, Zea mays
  Clone ID: LIB3181-002-P1-M1-G2
gtaaactgcttgctgctttacaggacaaattacaagccttgcggtgttacacacacgatggacacaactagcatactatgcagcatgacctactcatgtctggtgacatatctgtataacatgttcctagctctgaaaaagatcctagtaatgtccgttgatgctgtcacctacataaccggtgccggatccagacccatagc

SEQ ID NO: 30836 - DNA, 170 bp, Zea mays
  Clone ID: LIB3181-002-P1-M1-G3
tttaaactgtttgctgctttacaggacagggtacaattcttgcttatattacacacaccataatcacatctagttattccattcattaagtccttcttatgtttttttacatatacttttttacatttattatctgcttaatataattattttcttttaatttctttttc

SEQ ID NO: 30837 - DNA, 275 bp, Zea mays
  Clone ID: LIB3181-002-P1-M1-G7
gcaggggcgccgcgcggggtattctgtccgtcgttgaggatagagagtcacttgcaccgggggagcggagatgaagccggttgtggggatcgtggtgtctaacaagatgcagaagtcggaggtggttgcagcggacctacttttccacaacaaggtatacaaccgatacgttatgcgcaccttctagttcatggcacactatgatgacatcaccggtaacattggcaaccggattaggctggatccttttatggcctttggcatacacacgcact

SEQ ID NO: 30838 - DNA, 184 bp, Zea mays
  Clone ID: LIB3181-002-P1-M1-G9
cggacgcgtgggtgttgccctttgtccaacttgctttgacaaacccagcagcctcctaccaacaacacatcattggtggtgccctcttttagattgcttattagttgtaattcaataataaagttttttggatgatgtatgtggccaaccagaaataagaagttacatttccagattctaatgt

SEQ ID NO: 30839 - DNA, 257 bp, Zea mays
  Clone ID: LIB3181-002-P1-M1-H10
aataaaaaaaaaaggataaggtgagttcccatacattcataataaataacccttttttaatgctaacctaaattcaaaaaaaaaaatatgtcgtaggggtgtacattttacaggtttacggactcctttctcctgcattcaaagttttttttttttctatcgcgtaacctaaattactatccttggctttacattttcaacactgtgaatgcaaataccttaccactctcaattgttattgggtcgcaccctatttc

SEQ ID NO: 30840 - DNA, 340 bp, Zea mays
  Clone ID: LIB3181-002-P1-M1-H11
cagaaacacaccaagcgaagcgcactagcaacaacctaacaacaatggctaccaagatattatccctccttgcgcttcttgcgctttttgcgagcgcaacaaatgcgtccattattccacaatgctcacttgctcctagttccattattccacagttcctcccaccagttacttcaatggccttcgaacacccagctgtgcaagcctataggctacaacaagcgattgcggcgagcgtcttacaacaaccaattgcccaattgcaacaacaatccttggcacatctaacaatacaaaccatcgcaacgcaacagcaacaacagttcctaccagcactgag

SEQ ID NO: 30841 - DNA, 256 bp, Zea mays
  Clone ID: LIB3181-002-P1-M1-H3
gttctagctcttcagctggcctgcctgagtcttgctgtgggacggcgtataggcgggttccatcccgtatcgcatcgtggactgttcctgatggtccgtgactgacgttctcgcgagcgctgattctgctcatagggaaagcttccagttcatgacgggtccttctgttctcgatgggggcaattaaaagcagatgcacgacgcccgcgcctattcgccttatcgacatttgttccatgcggacgttttagaggat

SEQ ID NO: 30842 - DNA, 405 bp, Zea mays
  Clone ID: LIB3181-003-P1-K2-A3
cgtccgcgtcggccagcagttttagttatctggatctcgacctgggcttcgtctccgctggggaccgacggagggagtgccgcggaacggtggccgagtgcctcgccgaggagtcggatgaggagggccttgacctggccggatcccaccgccgcgcgctctacggcggcgggtacatcagccgcggcgccagctactacaactgccgccccggcggccaggccaacccctaccaccgcggctgctcccgcatcacccgctgccgcggctgaggcggctccggatccgcccgactgccgaggaaaggtctggttggtcaaggtcccggccctttcgccgacaataatttctttcgccttgttcgttcaggcgctaccggcacccttaccgtcactgctgtttact

SEQ ID NO: 30843 - DNA, 68 bp, Zea mays
  Clone ID: LIB3181-003-P1-K2-A7
gtaattcaataataaagttttttggatgatgtatgtggccaaccagaaataagaagttacatttccag

SEQ ID NO: 30844 - DNA, 293 bp, Zea mays
  Clone ID: LIB3181-003-P1-K2-A8
cggcagacctggttcggcttactctctcctatttcctgtctatcagcagtcagattctctcgtctgtgctgatggcgtccaactacgtcgacaccggtgcggaggaaggcaggttccacggtcactgccacggccacggtcaccactaccaccacagcacgacgccgaccagcgcggcggcgtaccccaagacgcttcggaggagcttgtcgttcgcccacagacacggcgccgcgcccaagtgcgtgtgcgcgccgggcactcacgcaggctacgtcaagagccgtctccac

SEQ ID NO: 30845 - DNA, 447 bp, Zea mays
  Clone ID: LIB3181-003-P1-K2-A9
acgaccccgcgtccgattatcatgtgtggtatgaccaataatatattcatcataataaagctttggttttaaaaaaaaaacggcaaattttaaaaaattttatacacaccacaaactaatcaaaacttattatcttttttaatctcactttcctcttccttctaaattttcaactttattttttcttatcttatcaatatttttacctctatgtttttttaatctatttcttctttataaaaattcttcattattttttttttctttttccccccttctttatattttccatcttatccctctctctttcttttcctatttatctctttttttttatttttcccttttcatataatatatttatcctccctttttttataactctttttttttttaataaaaccctcttttttctcctttattttataatttttttttataatataa

SEQ ID NO: 30846 - DNA, 310 bp, Zea mays
  unsure at all n locations
  Clone ID: LIB3181-003-P1-K2-B10
gttctagaccgcaaccggccgcccttttttttttttttttttnnnnnnnnnnnnntnnnggggggggtgtttttttaatttttttttnnccnncncnnccccccccggaaataatggtattgcttcaaccaaaagcattcattctttggcagacaaaatacacttcccaccattttccaaattggctgaaactaaacccacagccccaatcttccaacggtgcatttgaagcggccattacaaaaaactgttcccacccctaattgtatccttatgggcctaaaaaaaggcccaggacccaattctgcct

SEQ ID NO: 30847 - DNA, 440 bp, Zea mays
  Clone ID: LIB3181-003-P1-K2-B7
gtcagcctagcaattagctcatcgactccagattggagaactcgacaccatgaaggtgctgatcgtggcccttgctctcctggcgctcgctgcgagcgccgcctccagtacaagcggcggctgtggctgccagacaccaccgtttcatctaccgcctccgttctatatgccgcctccgttctatctgccgccgcagcagcagccgcagccatggcaataccccactcaaccaccgcagctaagcccgtgccagcagttcggatcctgcggcgtcggcagcgtcggcagcccgttcctgggccagtgcgtcgagttcctgaggcaccagtgcagcccggcggcgacgccctacggctcgccacagtgccaggcgctgcagcagcagtgctgccaccagatcaggcaggtggagccgctgcaccggtaccaggcgacatacg

SEQ ID NO: 30848 - DNA, 410 bp, Zea mays
  Clone ID: LIB3181-003-P1-K2-B8
ctcgcgggggatcgcctctaccctcaccaagcacggttgcagattggtcttgttgggcgacgagggcgcgctggccgcgacggaggaggaggcgcggcgctgcggggtagggggcggatgcgtcgaattggtcgggctggacttcaaggcgtgcggtgaggctgctgccgacgcggcggtggatcgggcctggcgctgcttcgccggactggatgccttcgtcaactgctactcctacgagggggaggtgcaagattgcctcagtataagtgaagacgagtacaggaagaccatcaaagtaaatgtgataacaccttggtttctaatgaaggcgatcgcaaagcggttccaggatacaaaatctggtggatctattgtgttcttgactcacattattggtgctgagagag

SEQ ID NO: 30849 - DNA, 150 bp, Zea mays
  Clone ID: LIB3181-003-P1-K2-C2
ttttctcataatttgattgtttctcttatactttattattattgtttcagtttacattttgtttattcttattacttctttctttcttacattttttcttcattttttctatttttgtttattatatttctatctttatttaaatgtatt

SEQ ID NO: 30850 - DNA, 140 bp, Zea mays
  Clone ID: LIB3181-003-P1-K2-C9
ctgaaattgtaaatgaccaacggctataaagatgtctacagttttcctatgtatattaaggatacaataatgctttcgaatgcctccagttaatactagtaaaagcagtgatggccaatatattcatgcgtgtggttctt

SEQ ID NO: 30851 - DNA, 96 bp, Zea mays
  Clone ID: LIB3181-003-P1-K2-D1
ttcgtcatgtggccggtgcttttgtcatttttctaaagtcttttccttatggttttttctataggctttttccgctttattttatattttttcttc

SEQ ID NO: 30852 - DNA, 413 bp, Zea mays
  Clone ID: LIB3181-003-P1-K2-D12
tcggcgccgctcaaggccatcgacttcggcctgtccgtcttcatcgaagaaggcaaagtttacagggacgtggtggggagcgcgtactacgtggcgcccgaggtgttgcgccggaactacggcagggagatcgacgtctggagtgctggcgtgatcctatacatccttctatgcgggtcgccgcctttctgggaagaaacgcagaaaggcatatttgacgcaatattggccgacgagctcgatctggtctcctccccgtggccctccatatctgaaagcgcgaaggatctcattagaaaaatgctgaacaaggaccctcagaggcgcattacggcttcacaggccctagaacatccatggctcaaaggtggtgcacctgacaggcctatcgacagcgcggtcctgtcaagaat

SEQ ID NO: 30853 - DNA, 344 bp, Zea mays
  unsure at all n locations
  Clone ID: LIB3181-003-P1-K2-D3
cacgcgtccgcagcagtgcaacaagcaagatttacctgctcttcgatcatatcgncaactggtccggcagggcgcgacaccatgagcttcacggagtgcggcggcggctgcggcgccaagacgtcgtggcctgaggtggtcgggctgagcgtggaggacgccaagaaggtgatcctcaaggacaagcccgacgccgacatcgtggtgctgcccgtcggctccgtggtgaccgcggattatcgtcctaaccgtgtccgtatcttcgtcgacattgtcgcccagacgccccacgtcggctgataatatataagctagccgttatttcctttccatgccccagaact

SEQ ID NO: 30854 - DNA, 453 bp, Zea mays
  Clone ID: LIB3181-003-P1-K2-D4
gggcggaccacgcgtccgaacacaccaagcgaagcgcactaccaccaatttaacaccaatggctaccaagatataagccggcgtggcgcttcttgcccttttagtgagcgcaacaaatgcgttcattattccacagtgctcacttgctcctagtgccattattccacagttcctcccaccagttacttcaatgggcttcgaacatccagccgcgcaagcctacaggctacaactagcgcttgcggcgagcgtcttacaacaaccaattgcccaattgcaacaacaatccttggcacatctaaacctacaaaccatcgcaacgcaacagcaacaacagtttctgccatcactgagccacctagccgtggtgaaccctgtcgcctacttgcaacagcagctacttgcattcaacccacttgctcttgcgaacgtagctgcataccaacaacaaca

SEQ ID NO: 30855 - DNA, 52 bp, Zea mays
  unsure at all n locations
  Clone ID: LIB3181-003-P1-K2-D7
cacgccgnntccggtcgnctgatctccaacctcncnnctcgaccaccccact

SEQ ID NO: 30856 - DNA, 259 bp, Zea mays
  Clone ID: LIB3181-003-P1-K2-D9
atcgggaccagcgcgagcaggcccaacgctgctaacgcggtcccgtcccagactgcggcctggcctctggccctgcgggggcgcggtcgcgggccacggggcctcccgcgcggagggcagatgacctggcgccgcgcggcgcacacggtggggggacttggcgggggcacggacattcacaccggggtcgtcggggacaccgtgagactggcagggcggtgcgtgatgcgactgccgggcaagttgtactgtccttaac

SEQ ID NO: 30857 - DNA, 99 bp, Zea mays
  Clone ID: LIB3181-003-P1-K2-E2
atctaaaagagggcaccaccaatgatgggttatagttcaataatgaagttttttggatgatgtttgtggcttcccagaaataagaaagtacatttctag

SEQ ID NO: 30858 - DNA, 83 bp, Zea mays
  Clone ID: LIB3181-003-P1-K2-E7
cggccgaccacgcgtccgcttatgagttatagttcaataataaatctaaaagagttcaccaccaatgatgggttgttgggggg

SEQ ID NO: 30859 - DNA, 513 bp, Zea mays
  Clone ID: LIB3181-003-P1-K2-E8
gtcgaccacgcgtccgcagaccattagctttatctactccagagcgcataagaacccgatcgacaccatgagggtggtgctcgttgccctcgctctcctggctctcgctgcgagcgccacctccacgcatacaagcggcggctgcggctgccagccaccgtcgtcgttttatttacctgtttctgttcatttgccactttcgtgttatttgccatatcctattcatttttccacctttgtttttttttttcttttgtctttattattttttttatatttcctttattttatatattttttctttatttttttaatacgatttttctatcttttttattttatttgttttaatgtttttttttatttttttttctttttttttattaatctttctttatatatttttatttattatttttaaatttatctttatttattgttttttttaattatttctaaatttttatctatatttttttctacttttttttacttctttattttattttttat

SEQ ID NO: 30860 - DNA, 326 bp, Zea mays
  Clone ID: LIB3181-003-P1-K2-E9
cgtccgatatctcccacttgacatacaatacaacattttcgttttggggcagacacagatagtaaggggcgggtggatttaaacctaccttctagtaaccaacttctacctttacttcaacaacttcctccgttgtatatggacctaataaaaggtcgggaggtccttattccaaaaccataagagacacgccgcctgataaaaaacctactatggtataccttggaatctctttattaaggttaatgattattataattgttaaacctttaccctcgcactagttctaatcttttgaaccactattagcccattgtttgatatgt

SEQ ID NO: 30861 - DNA, 326 bp, Zea mays
  Clone ID: LIB3181-003-P1-K2-F1
cggacgcgtgggctgcagaaccgaaaccacttacgcgcgctcgctccccgcgcccaattcggagatccacccccccaccgaatccgctcgcctgcgcctgcgcctgctacctgcgatccatctctcatggcgaccaccagcgccaggaggccgagcggcccggtgctctcggccgcgcactaccgctccgcctcgccgacgcgcgtctcgctcgccgggcagcccgtcagcgtcagcgtgtcctcgtcgtcgcggggccggcggacctgcatgtgctcgccgactcaaccacccgggctcgttccgatgcagcctgcacaaggagc

SEQ ID NO: 30862 - DNA, 450 bp, Zea mays
  Clone ID: LIB3181-003-P1-K2-F12
gtagctacagaggaagcagtatatttgacataatatgctcgacatgttcatttactagttagaaaggatcagctacgggcttccaaagctatgcaggacaggttgattatggcgaatgtttcagagtactcaacaaccccaacataacagtacatttcaatacagaagccatggatgttgttagcaatgacaaagggcagatgtctggcgttcatctgaagagaagagatacaggagaagaatcagttcttactgtgaaaggtttattttatggcataggacatactccaaacagtcagctgttgcagggccaaatcgaacttgatagtgctggctatattttagttaaagagggctcagccaaaacttcagttgatggtgtattcgctgctggtgatgttcaggatcatgaatggagacaagctattactgcagctggatctggatgca

SEQ ID NO: 30863 - DNA, 344 bp, Zea mays
  Clone ID: LIB3181-003-P1-K2-F2
aaaaggggccggcccacgcgtccgattgaactctcctgcttatttacagtagctatatctactaccattcagccagctagctggggggagctttgctaccttcttgatacaaccacagctgttgccgttctaccagcacgctgcgcctaacgctggcaccctcttacaactgcaacaattgctgccattcaaccaacttgctttgacaaacccagcagcgttctaccaacaacccatcattggtggtgccctcttttagatttcttatgagttatagttcaataataaagttttttgtctgatgtttgtggctttccagaaataagaaagtacatttctaaaaa

SEQ ID NO: 30864 - DNA, 287 bp, Zea mays
  Clone ID: LIB3181-003-P1-K2-F4
caacaactactaccattcagccagctagctgatgtgagccctgctgccttcttgacacaacaacaggtgttgccgttctacctgcacgctatgcctaacgctggcaccctcttacaactgcaacaattgctgccattcaaccaacttgctttgacaaactcaacagtgttctaccaacaacccatcattggtggtgccctcttttagattgcttatgagttatagttcaataatgaagttttttggatgatgtttgtggcgtcccagaaataagaaagtacatttct

SEQ ID NO: 30865 - DNA, 445 bp, Zea mays
  Clone ID: LIB3181-003-P1-K2-F9
atattctcccaattggcatcgtatccaacaatccgatttggggcagaagcagctattaagcagcttgagaatctaagcccacctgttgttaagcaacttctacctttacttcaacaacttcctccgttgtatatggacctaataaaagggcgggaggacttcattccaaaaccagaagagacacgccgcctgataaaatcctactatggaatttctcggaatctcttagtaaagtttaaagatgatcaaattgatgaaacctctacccttgcacaagtactaagctctgaagcagctattagctcattgcttgatatgtcaattcgatcacttcctggggatcatgggttaccattacaacaggttcttcctgatgttccaccagcaatggctgatgcagtgaaccgcggaggtgaacttctgacaaatctgacaacaggcacac

SEQ ID NO: 30866 - DNA, 228 bp, Zea mays
  Clone ID: LIB3181-003-P1-K2-G2
cgctcactagtcggggttgaggccgtcttcgcgcatgccgatagttgtatggacctataatactgccggtacaaccgactgaaaccgcgtcccaacttaatcgctgcacatccttgcgtggtatcaagcgacgtgccttcaacggcgcgaggaaggccccctgtcgcattaccgcgtgggggtcccagggccgtcatgcggcctcgcgtcttgttttcttctttgccg

SEQ ID NO: 30867 - DNA, 452 bp, Zea mays
  unsure at all n locations
  Clone ID: LIB3181-003-P1-K2-G8
gcagttaccctttggtgcatttatntggcacaattacattttggcacgaacaactacaacaactgcgtgcgtggcaaaccttgctgtcttactctcagcaaccagcagttaccttttggtgcatttgttggcacaanaacatcagggcacaacaactacaacaactcgtgctagcaaaccttgctgcctactctcagcaacaacagtttctgccattcaaccaactagctgcattgaactctgctgcttatttgcagcaacaacaactactaccattcagccagctagctgctgcctacccccggcaattttttccattcaaccaactggcagcattgaactctcatgcttatgtacaacaacaacaactactaccattcaaccagctagctgctgtgagccctgctgccttcttgacacagcaacatttgttgccgttctaccttcacact

SEQ ID NO: 30868 - DNA, 306 bp, Zea mays
  unsure at all n locations
  Clone ID: LIB3181-003-P1-K2-G9
gaantcccgggccgacgagcctgcgctgctcgacgcgctcgagcgcggcgcgatcgctttggttttgctcgacgtgttctggaacgaagcgcgcgatcgacgagcgttttctcgcgttgccgaacgtgctgctgcagccgcatcatgcgagcggcacgatcgagacgcgtcaggcgatgggctggctcgtgcgcgacaacctggccgcgcacttcgccggcgagccgctgctcacgccggtcgtttgaggagggtgtcatgcgtatgcgctgcatgtgtgtcgtgattcacgggccgaacgacctg

SEQ ID NO: 30869 - DNA, 201 bp, Zea mays
  unsure at all n locations
  Clone ID: LIB3181-003-P1-K2-H4
gggggatactncccctccgccgctttgtctccctttaccttcttgcaagatgaaaaccatcctggcgtcgtagacttttgacatcccttagggcctcaccgtcacggtggccgccaagctggtcacggtggaggggccccgcggcatgctcacccttaacttcaagcactctaacctcgactttcagctgcatgaggccgg

SEQ ID NO: 30870 - DNA, 440 bp, Zea mays
  unsure at all n locations
  Clone ID: LIB3181-003-P1-K2-H7
ggcgaccctcgccggagccaaggcggcagccgtggctactatcgcctccgcgatccccaccctggccagcgtgcggatgctgccatgggccaaggccaacatcaaccccaccggccaggcgctcatcgtctccacggtggctgggatggcctacttcatcgccgccgacaagaagatcctgtcgctggcgaggcgccactcgttcgagcaagcccctgaccacctcaagaacaccttctttcagggcaccggccgtccccacccggctttcttcaggccgtgagacgtggccttcgtccagagctagctacctacctctttcagttcgatcgtcgtcagtgcaaagcaccaccaatgcctgaataaatntaactacgaggctagctggtgaacatcgatctgctactgctagtattactacggcgaggctgctgaacagc

SEQ ID NO: 30871 - DNA, 308 bp, Zea mays
  Clone ID: LIB3181-003-P1-K2-H8
gtgtggcctcttgcagataattgggaaatgccaaaataaactgttaaagaaactgacgaaggtgggctagtcaggctgaagtatacattcaaatacggagacacattcgttgagccagatgatgattggctaaagagcattgagaatgtaagtgatgaattgcttggggtatattcgaaggccgaagacactgcattgtcagcggccttcggaggccgaaaaaaagaaaagactcaaccgagtgtttgatgctgtcgggtttgtctaccccgactaccgctatttagtgcgggggcaaaaaagaaaag

SEQ ID NO: 30872 - DNA, 72 bp, Zea mays
  Clone ID: LIB3181-003-P1-K2-H9
gatgaatgatatgacatcacatggatttttttattttttaaaaaaaaaaaaaaaaaaaaagggggtggtttt

SEQ ID NO: 30873 - DNA, 76 bp, Zea mays
  Clone ID: LIB3181-003-P1-M1-A1
tgtttccgttatttaaataaaaaagtattttgggggatgtgtgtggccacccagagatatgaagttacttttccag

SEQ ID NO: 30874 - DNA, 183 bp, Zea mays
  Clone ID: LIB3181-003-P1-M1-A10
agagggaacgccaaagcaccttcatacccctccgcaattccccctatgcccatttcttcttatgtctacacctgctctcaatctgtctgttaacataaacctgctgctgcagacatacttcaactattatgaaatttaatttgaatatatttctcgccattttacaatattccgacttgtata

SEQ ID NO: 30875 - DNA, 154 bp, Zea mays
  Clone ID: LIB3181-003-P1-M1-A11
agatagcggtttttcttttccgatagagggcagttaaatggggtgagtgttatttggagggatggtgttaatcaaataagtgtacatacccctggcatgagatactatctttcgccatctattaagcattattgggaaaggaagagattcatca

SEQ ID NO: 30876 - DNA, 332 bp, Zea mays
  Clone ID: LIB3181-003-P1-M1-A12
aaagcaggctgatacctgtccgctatttccgcgatgcaaattttactttgcccatgagctgattaaaatgggacgggcccaacctgtgcaggtgggagaagacaacaagccagatgtcttctgggaggccctgtgctttaaggctgtctaccgcacatccccacggttgaaggacaagaatatggatgcccatccttcttgcctcttttcctgcttcaacaagattggacgtatttgtgatcaaatatgtttctggtgagcttatgcatgaagacctgtctaccgattgatttcatgcttttgtacacattgatccattttcttttttttgt

SEQ ID NO: 30877 - DNA, 178 bp, Zea mays
  Clone ID: LIB3181-003-P1-M1-A2
cctgccgtaaccgtgcctcatttacaggggcgacccacgctttcgtttttgacttagtaaggtttcttgtgggaagtttgttgccaatcaggggtaagcttttatattctgagttaatggcgcacaactacgttctcaccggggaggtggaaggcgtactcaactgccacagcaacgt

SEQ ID NO: 30878 - DNA, 388 bp, Zea mays
  unsure at all n locations
  Clone ID: LIB3181-003-P1-M1-A3
taaagggtcaaccaacgctttcaattataatgtgtggtatgaccaatagtatatgcataataataaaggtgtggttttaaaaaaaaaaaaaaaaaaaaaaaaaaaaaaaaaaaaaaaaaaaaaaaaaaaaaaaaaaaaaaaaaaaaaaaaaaaaaaaaaaaaaaaaaaaaaaaaaaaaaaaaaaaaaaatttaaaaaaaaaaaaaaaaaaaaaaatgaaaaaaaaaaaaaaaaatataaaaaataaaaaaacaaaaaaaaaaaacnnnnntggggggggggtttttaataaaaaaaattttaaaatgagttattatacatattttaatatttttaaaagtacaaaaaaaaaaaaaaaaattgggtcgtggaaaaaaaatggagttggg

SEQ ID NO: 30879 - DNA, 180 bp, Zea mays
  Clone ID: LIB3181-003-P1-M1-A5
tcgataactcataagaaatctaaaagtgggggggaagccacaaacatcaggcaaaaaactttattattgaactataactcataagaaatctaaaagatttctttttttgttttcctattattactttcactttggtttatttatttttccgatgatattatttactaacttttttttttt

SEQ ID NO: 30880 - DNA, 89 bp, Zea mays
  Clone ID: LIB3181-003-P1-M1-A7
ggaaccgtccgtattcccgcgtcgccctttctttcgacagttgcttcaaaaatggggaatgtccatttctaaaagggaaaaaaatccac

SEQ ID NO: 30881 - DNA, 312 bp, Zea mays
  Clone ID: LIB3181-003-P1-M1-A8
accgccgaagggagtgccatagcactacctacaagtgacctaccgaggagtcgtataaagagggccttgacctggccggatcccaccgccgagcgctatacggaggcgggtacatcagccgcggcgccagatactacaactgccgacccggcggccaatccaacctctaccaccgtggttgatctcgaatgacccgctgacgcggctgaggcggctccggatccgcccgactgcctaggaaaggactggctggtcaaggtcccatccctttcgccgacaataatttctttcgccttgttcgttcaggcgcta

SEQ ID NO: 30882 - DNA, 290 bp, Zea mays
  Clone ID: LIB3181-003-P1-M1-A9
atactcctccgcaatttcccagatgcaatttttcttttcaaaatccaactcaataaatggggcatgttttataactggtttgtgcgctcaaatagaacaagattaccaaccactagatgaaattcattcttcacatgacaaccttagatctattgacagtactctgcccttacacaaccattacttcattcaacatatattaaaatagcattttatgatataaaagacaatgctcccacccttacaccaagctatctatttagcatatttagcgtaccatgtttacgatt

SEQ ID NO: 30883 - DNA, 376 bp, Zea mays
  Clone ID: LIB3181-003-P1-M1-B1
tttcggtcagcctagcaataagctcatcgacgccagattggaaaactcgagaccatgaaggggctattcgtggccttggctctactggcgctcgatgcgagcgccggctacagcacaagcggtggctgttgatgccagacaccaccgagttatgtaccgagtccgtgctatatgcccactacgacttatctgccgacgtagcagaagccgaaaccatggcaatacctgactcaaccaccgaagctaatcgcgtgctagcagttcggatcctgcatcgtcggcagctgtctgcagtaccttcctgggccagtgcgtcgagtgcctgaggcaccagtgctagcccggcggcgactccctacagctagccacatgtgcc

SEQ ID NO: 30884 - DNA, 372 bp, Zea mays
  Clone ID: LIB3181-003-P1-M1-B11
atcctgcctcttatttcaagtcaatgcatgttactcatgcgcccagtatgtgtatgaagatatgggggagacaaatgaggagatggttcgaattatatgatttttgccacgttaccttgatgcaaatttgccaaatatgatactgcgaaaagatttgataacatttctaatgcctgactagaaagtcttaaaacatcattctttaaaaaaataatttaatatttttggttattccaatcttcactgttaacccaaacgattctgagataaaaattatgtgttatatgcacttcagtttacagacaaattagaactttgttttattttgagaagggggatgcattcatttggttttgatttttatttttgttt

SEQ ID NO: 30885 - DNA, 253 bp, Zea mays
  Clone ID: LIB3181-003-P1-M1-B12
tcttgttttctttctaaaacatacaactttaagtgaggcaaattagacaaaatgcgaccggcctatcaactattataatattcaagagatataattatggcgaaatcattctactatgctgcaatttaagattcaatcccttaacttcaattgatcttgactcaacctctttactttcataatgctattcagaacgtcaaatcgataacactgatagccgttgctgcttagccattatgtgcattaattttta

SEQ ID NO: 30886 - DNA, 411 bp, Zea mays
  Clone ID: LIB3181-003-P1-M1-B2
tcgctcgcgggggatcgcctctaccctgaccaagcacggctgcagattgggcttgttgggcgactagggcgcgctggccgcgacggacgaggaggcgcggcgctgcggggtagggggcggatgcgtcgaattggtcgggctggacttcaaggcgtgcggtgaggctgctgccgacgcggcggtggatcgggcctggcgctgcttcgccggactggatgccttcgtcaactgctacttctacgagggggaggtgcaagattgcctcagtataagtgaagacgagtacaggaagaccatcaaagtaaatgtgataacaccttggtttgtaatgaacgcgatcgcaaagcggttccaggatacaaaatctggtggatctattgtgttcttgactcaaattattggtgctgagag

SEQ ID NO: 30887 - DNA, 311 bp, Zea mays
  Clone ID: LIB3181-003-P1-M1-B5
agaaggaaagaaaacacacctgccgacaccttccctactttcccgcgtccacccaccttttctctttctctccctccctttttctcttctgttctggttatattaacaaatgcgcgcggtccccacttacttacacattttcatcaataaataatcctatgcatccataattatacatcacgatctgaccctatctttttacttaccatatatatctccataatctactatctttccatctataatgagtaatctaattacacttcttttaccattcttaccaacccattccctaccttcatccaaattta

SEQ ID NO: 30888 - DNA, 366 bp, Zea mays
  Clone ID: LIB3181-003-P1-M1-B6
gtaccgcgcctaattcccgaatatgacagctctttttcttttcggaacgttggcttacacaccggctggagtgaacaactattagggaccctacttaaaccacttgacagaaaaggcattgtaattatgtgagctgataaaaacacaccctaaccaaaaccaaccaacacacacttgtgtgaaaggtgctatataattgtcacgcattaaacatactatatattacgccatgataagaacagtttccctgcattgccaccaaaatgataaaatctcatgaaataaataaaaatttaggtgatgggcagatccttttctttaaaatagaaaaagttaaaactcttagtagtacataaatcagatctt

SEQ ID NO: 30889 - DNA, 481 bp, Zea mays
  unsure at all n locations
  Clone ID: LIB3181-003-P1-M1-B7
aaaaaattagggaacggttctgcaccctgatacccctccgcaattcccgcgatggctgttcaacttatccttctctccacagcaaacccgccatgctttaaagcatgagtgcttacgcacnaaaagcagacctttaccccaccacctcagcttcaacagcagcaggtgaaacaacccagccagcctccacctcatgaaccatttgttcccataaccaaggagccatgccacccaaaggttccacaacctggaaacacaaagattccagagccagattgcaccaaggtccctaagccaggctacaccaatgaccctgagccaggcagcaccaaggtccctgacaaaggctgcaccaaggtccctgagccaggtagcaccaaggtccctgacaaaggctgcaccaaggtccctgagccaagcagcaccaacgtccctgagccaagcagcaccaaggtccctgacaaaagctgcatcaactttt

SEQ ID NO: 30890 - DNA, 336 bp, Zea mays
  Clone ID: LIB3181-003-P1-M1-B8
aacaaaacagcaggctggtacccctcctcaattcccccgattccactttttttttttgacacaccctacacaaccagtcacaccgacatatataaatggcgttcggctaaaacaacaaccatttatccatgattatctttactatctacaaaactataatacaaacctaattcacttccattgtaaattatttcactacacttttaatcatcccaatcctcacgatatactcttaaaccaactattacacatacttcaatataaacaaaaattcaatccatatcttcaactacatcttaaccctcattttcaacccctatacatttcaacaatata

SEQ ID NO: 30891 - DNA, 477 bp, Zea mays
  unsure at all n locations
  Clone ID: LIB3181-003-P1-M1-C10
agaanaagagggaacgaaaaagcgggttggtacccctccgcaattcccgcgataggagtttctttttttcagccttccaaggtgctgggagtgcgggcgtgagccactgggcccaggcatctataatttcctggtagtcacactggcaacaaaacaccttagaaccagatatcaaccccctccaagcaatacgtgaattccctttacatgaaacgtcagggctacctgagtatctgtgttgaatgcagtctgaaatgaccctgtggattttactggctggttgccactactgtacaacattcagtgcccacacccacctgttccattaaggttttttgagacatgagagatgcctattccctgctgtgtgacacggatttgtgtagttggaaagaaaagacaacattagggagtaaacattcaagctttttacctgtaggttgaatctgccgccacttggtgtttattaccagctat

SEQ ID NO: 30892 - DNA, 336 bp, Zea mays
  Clone ID: LIB3181-003-P1-M1-C12
atccgccatttatttcgccagcggcagataatctacaacgggcagggtgcccagtctaccgagggtgaggtctctacatatgccatcctgactgctcagctggatgaggagctgggaggtacccctgttcacagccgtgtggtccaaggcaaggagcccgcacacctcatgagcctgtttggtgggaagcccatgatcatctacaagggcggcacctaccgcgagggtgggcatacagcccctgccagcacccgccttttacacgtccgcgccaacagtgctggagccacccatgctgttgtggtattgccttaacgctggtgcactgtactttta

SEQ ID NO: 30893 - DNA, 179 bp, Zea mays
  Clone ID: LIB3181-003-P1-M1-C3
acgttgaaattgtaaatgaccaacggctgtaaagatgtctacagtttttgtatgtgtattaaggatacaataatgctttcgaatgcctgcagttaatactagtaaaagcagtgatggccaatatattcatgcgtgtggttcttaacacgccggtggtgattgacaattaaaaaggacgc

SEQ ID NO: 30894 - DNA, 273 bp, Zea mays
  Clone ID: LIB3181-003-P1-M1-C5
aagagggaacgaaaaggcggctggggaccccgccgcaattcccccgatgcctcgacccttttgctttggctcatccatcgtaggcagtggcaggcgaggtgctttcagctgagtctcagcgactgaaggatctgaccgatgctcatctgggggctttggcagcaagagcctgtacaaccttggggtgaacacgagcatcttcatgagtgtggctgggtcacgacaaggcgcctgttatggaggtgctgaaggcttgagcactgatggctttga

SEQ ID NO: 30895 - DNA, 60 bp, Zea mays
  Clone ID: LIB3181-003-P1-M1-C7
agagggaaagcaacgacgccttcatatacctccccaaaattcccgattcaactttctttt

SEQ ID NO: 30896 - DNA, 224 bp, Zea mays
  unsure at all n locations
  Clone ID: LIB3181-003-P1-M1-C8
aaaaaaaccgcagcctganaccccacctcaattcccccatttacattccctcattcacccaccactaaccatccacaccgtaaaaattaaaaatcattccgtccccaaaaaccccaaacactaaaccttttattaccatacaattctctccatttatcatatcccctcttctatcctcacacaccttctttataacccctttcccccaacacacatctctcttt

SEQ ID NO: 30897 - DNA, 398 bp, Zea mays
  unsure at all n locations
  Clone ID: LIB3181-003-P1-M1-D10
agaangaacaaaaacgcaggctggtacccatccgcaattccccctattctcattctcttttttcgacncaccacctaaaaantctgctgtttaaaataaaactacgtttgtcctcanaattnnaattctaattcattttactctcatctatcaacctttatttattttctacaattaaaaaacactcacatttttttttattcttccttaaaccattttcatcatctacactctaaaattncctctttaccaaccatatttatacaaaatactcttaccatatatctataccatcctancctatatttttaaaccccatctctacctaattatcttacccttatcctcttctccttttatcccaattactttctactctttaccattaaaatctcttt

SEQ ID NO: 30898 - DNA, 390 bp, Zea mays
  Clone ID: LIB3181-003-P1-M1-D12
tcggcgccgatcaaggccatagacttcggcctgtccgtcttcatgggagggggcaaagtttacaaggacgtggtggggagcgcgtactacttggcgcccgaggtgttgcgccggaactactgcacggagatcgacgtctggagtgctggcgtgatcctatacatccttctatgcgggtcgccgcactttctgggaagaaacgcagaaaggcatatttgacgcaatattggccgacaagctcgatctgatctcctccccgtggccctccatatctgaaagcgcgaaggatctcattagaaaaatgctgaacaaagaccctcagaagcgcattacggcttcacaggctctagaacatccatggctcaaaagtggtgcacctgacaggcctat

SEQ ID NO: 30899 - DNA, 394 bp, Zea mays
  Clone ID: LIB3181-003-P1-M1-D3
gagtcaagacagcttttaggctgtacatggtgtacaggctcggagtttatgaatgctttctagggtagcgcccgattcattctgtcgttattgtgttgatgagacttgatactactagtcgcttgcattggacctgaactacaagttgtactaggcggctgatccacatccgaatacactccttgattgagctgctagttggtggccgggatgtcgtatgcgcactgctgcactgtgacctggtcgatgggcagcgtgtcggtcgggaacgggcatgcgccgtcgtgcgcgccctgtagcgggtcgcacggcgcggggctgacgttggccgacactccctcgatgtcggcgcagtatcatgggtacttcctggacttggacaggtcggcggtga

SEQ ID NO: 30900 - DNA, 393 bp, Zea mays
  Clone ID: LIB3181-003-P1-M1-D4
tcgaacacaccaagcgaagcgcactaacaacaacggtaacaacaatggctgcgcaagggattaaccctccttgcgcttgttgcccttttagtgagcgcaacaaatgcgttcattattacacagcgctcacttgctcctagtgccattattccacagtatctaccaccagttactgtaatgggcttcgaacattcagccgtgcaagcctacacgctacaactagcgcttgcggcgagcgtattacaacaaccaattgcccaattgcaacaacaatgcttggcacatataaacctacaaaccatggcaacgcaacagcaacaacagtttctgccatcactgagccaactagccgtggtgaaccctgtcgcctacttgcaacagcagctacttgca

SEQ ID NO: 30901 - DNA, 468 bp, Zea mays
  unsure at all n locations
  Clone ID: LIB3181-003-P1-M1-D7
aaaaaattagaaacaattcgcccccgcnacacctccccaatttccccgattcttattttttttttatccccacccccaaaacaanctgacctgttaattataaacaacgtttgtccgnncaactacaccacatcttttaatttcatttttcactttttttttttctcatttacttttacattcccaaatattatttttttaccactctattttattcattaattattcatttttcattttcttctttattctcaatacccttaacctaattactctttatacctattttacttcattactaacacatttttatttttttttcattatatttcatattctttattcttctatcttattatctttcttttttcactacatatctattatttatttctttatatatatttcttacactctttacctcctattatttttttttttttaatatctcttatttatctttttttt

SEQ ID NO: 30902 - DNA, 382 bp, Zea mays
  Clone ID: LIB3181-003-P1-M1-D8
aagaacaagagggaacgctaaagcacgcctgatacccctccggaatacccccgatctcaacttctcttttcgaacctcgcatctggtatgcgggtcctccatattgacaatggggggggctcatccggacgctgaccacaactacacctcaaggctgttcatcggcttcagtgcctgcaccacgttgctgcctgatgtgcacctgctggcactcatgaacaccacctgcgtgctcctcaacatcaaggctgacagcaacatgcacaagctcaacgtcggcaacgaggccacccacgatcatatgcacaaccacatccagctgttctgcgacttctgcaccgacacacccaccctggtttgactagacattagctagctgcta

SEQ ID NO: 30903 - DNA, 132 bp, Zea mays
  Clone ID: LIB3181-003-P1-M1-D9
atgaaccgtttttttttcacctgcacgctctcacatctgggatgagtatcattaactacggcgagaacaaacgagctaaacctgaccagacctatttgatcacacatttcgaaaaccactccactaacccct

SEQ ID NO: 30904 - DNA, 98 bp, Zea mays
  Clone ID: LIB3181-003-P1-M1-E1
tttatgagtaatagttcaataataaatctaagagagagccacaaacatgagacaaaaaactttattattgaactataactcataagaaatctaaaaga

SEQ ID NO: 30905 - DNA, 459 bp, Zea mays
  Clone ID: LIB3181-003-P1-M1-E10
gcaggctggtacccgtccgctattcccgcgatccggattgtatatatggctgtgcatgaacctcgtgaccatgtgtttgaagactcctagcgggagctgcatcgcaaatcccctgaagaaatgaagaatcgattgtatatagtgtttgaaggagaagaagggcaggatgctggcgggctcctgcgggagtggtacatgatcatctctcgggagatgtttaaccctatgtatgccttgttccgtacctcacctggtgatcgagtcacctacaccatcaatccatcttcccactgcaaccccaaccacctcagctacttcaagtttgtcggacgcattgtggccaaagctgtatatgacaaccgtcttctggagtgctactttactcgatccttctacaaacacatcttgggcaagtcagtctaatatacagatattgagagtgaagattaccacttctac

SEQ ID NO: 30906 - DNA, 358 bp, Zea mays
  Clone ID: LIB3181-003-P1-M1-E11
atcaagccgcttgttagacctggtacaggttaagaatgggatcagtggagagcctgccattccttcagctaaggtcaggcccctggggcgctcccccttctgttgatagcatgtgggagtgagaaaacaaagtcattgagcataaggaatgagtgcatctgtgcccatatttaaggtgtgaccttggagaagctactctgtgggcatgacagcaaaggagaaaatcatgcggcatcttaaggtctgacatgctttattatgcatagtacttggggtttgttttgatttgttacgtttcgttactgaggtggagacttgcgctctgttgcctaggctggagtgaagtgctgcgatctta

SEQ ID NO: 30907 - DNA, 156 bp, Zea mays
  Clone ID: LIB3181-003-P1-M1-E12
atggccattcatcgcttctgactgcacctgctctcaatgcgtgctctaaccatgagcctccgcctgcagagctcctacaacagctatggaggtggttctgacaaactgtccttctaatctctttgtctccagttgtctcatagatccgcctaaaaa

SEQ ID NO: 30908 - DNA, 359 bp, Zea mays
  Clone ID: LIB3181-003-P1-M1-E2
agctgtgacaccctgccggaaccgtgccgcatttacagggtcgacccatgctttcgttgaccataaccttaatctactccagagcgcagaagaacccgatcgacaccatgagggagactgatcactgccaccgatggtgtggctcgtcatatgagcactaaatcaacgcatacaaacggctgatctagctagctagccagcggctatactacagtacatagtttcttcagtgggggacaccggcggcagcagcgtaggggcatggagtcggatgctgcaggccgcacattgccgtcagttgctgcactatatgcgtcgtcaactagtctagtgaccttgtccgttttttaggttgtatt

SEQ ID NO: 30909 - DNA, 340 bp, Zea mays
  Clone ID: LIB3181-003-P1-M1-E3
cgggcggaacctagcctcaattacagcgtccacccatgctttcttttttttctcatttaaactaaactcggactgtgctatttttcccaggggcaggtactaaacatctagaaaatctaagctcacctgtagttcagcaacttctacctttactctaacaacttcctccatgcatattgacctaataaaatggcaaaaggacttcattccaaaaccaaaatatacactcctcctgataaaatcctactatctaatttctcgtaatttaatatttaagactaaagatcatcaaattgattaaacctttattcttgcacaattactaatctattaatcattt

SEQ ID NO: 30910 - DNA, 117 bp, Zea mays
  Clone ID: LIB3181-003-P1-M1-E4
taggaaaagctatgacccctgccggaacctttcctcaattacagcgtccacccacgcgttctgttatagttcaataataaagttttttgtctgaaaaaaaaaaaaaagggggggtac

SEQ ID NO: 30911 - DNA, 87 bp, Zea mays
  unsure at all n locations
  Clone ID: LIB3181-003-P1-M1-E5
gactcaactatangtggaaaggctggtaccgctctgcacggtacccgtgtcctggaattacccgggtacgacgaggctcactatgtc

SEQ ID NO: 30912 - DNA, 322 bp, Zea mays
  Clone ID: LIB3181-003-P1-M1-E8
agaaggaacaaaaaagcaccttcagacacctccccaaaacccccgattcaaactttttgttttatcaaacccatttactcactttcacgggcacatattatatccgttcggtcatctaaattacacatcttctatacatactactccaaaccttcattgctacacacaaaacaatatcttcatcagtactaatcttatcctttctcatatcactcctattatatctatccacctaaaaattcatgaacaccatccttactttcacctctttacatccctatctcatcaccttctacactatatacctcaccttttcacccat

SEQ ID NO: 30913 - DNA, 322 bp, Zea mays
  Clone ID: LIB3181-003-P1-M1-E9
aaaacaagagggaacgctgaagcgccttcatgcaccgccccaaaattcccgagcccacccatacttaccgggacgcgtgtgctgcaaatgggagaccacccacgcgcgctcggtatgtacacacaattcgtagatccacccgcccacctaataccctcgcctgctcctgcgctctaatacctgcaacccatctgtaatcctgacctccagccccaggatgcactgcctgccaacgctttcctgctggcactaccgcactggctggcaagatcaagttttgcttggtggacagcacgctagtgttagccagtcctactcgtcc

SEQ ID NO: 30914 - DNA, 449 bp, Zea mays
  Clone ID: LIB3181-003-P1-M1-F10
aaagaggacaaaaaggggctgctaccggtccgtattcccgagattcgatctattttaatacactaataacccaatgccaagtgtaacttaacctggggtggcggataaaaaatcacacataacataacaatctattaacgtattggcatgacaacaacatttgctatgcaactctgaatggcctaactcatcactcaacaacaaattaacatggattttcacttcgatcaatatcccacataacaccacaaaaaaagctaacccatctaacgtcgcaacgtcaggtaaagttcatcaccagtctcaaatgcttctgactgaattaatcaaatccactaatgcatatgagcatgaaatctgcaacaagctctttatacaaaatactatctaatttttacagtaatatttacaatccatccacatatttcaccagacacactgaataattt

SEQ ID NO: 30915 - DNA, 228 bp, Zea mays
  Clone ID: LIB3181-003-P1-M1-F11
cggatccgccctttctttttatatacttctgataactatccgggctgggcattataaagattaggggggcaaaccaaaaaaccatactaaatatacctatctgatcctatatcatacctaatcccctcaattccttcacccttatcacccacataaactttcattttacgatatcaaaaaactcaccctatattataatttctccaccaactagaatatatcatataa

SEQ ID NO: 30916 - DNA, 318 bp, Zea mays
  unsure at all n locations
  Clone ID: LIB3181-003-P1-M1-F12
aaaanaagagggaacgcaaaagcgccttcatacacctccccaaaattcccgatccgaccttttcgtttttgtttaacataaatatcaggccataggcaattttcacacagcgatgcgtaaatgatacataaaccttatataaaaataacaccattcacaattcataattctataacaaacaattcaactgcattgcatgcaattgaacgaaacattaattgcacccaattatcaaacttcaactcattgtgctaactctcaatcatacgtctacattcctgcttctaaatcacaaaacaactaattttagacctcaaa

SEQ ID NO: 30917 - DNA, 401 bp, Zea mays
  Clone ID: LIB3181-003-P1-M1-F3
aaatagaaagctgtgcccctgccggaccggcccattacagcgcccccaccgtcgatattcacaatggcataactcgacaatccgattgggcagaggcagtataaaagctgagaatctaagcccacctgagcaacaactgaccttacttaacaacttactcatgatatggacctaaaaaagtcagaggcttatccaaaaccaaaagaacgccgctgtaaaatctctagcgattctggaatctttactaagactaacgacgtaaatcgatgaaaccttaccctgccaagactaagctatgaacgactttagctcattgctagaatgcaatccgacactttctgggatcatggggaccattacacagctcttcctgagttccccagcaaggctgatgcacgaac

SEQ ID NO: 30918 - DNA, 290 bp, Zea mays
  Clone ID: LIB3181-003-P1-M1-F4
tcgtatcaactactaccattcatccagctagctgatgagagccctgctgtgttctagacacaacaacagatggtgccgaactacctgcacgctatgcctaacgctggcaccctcttacaactgcaacaagagctgccattcaaccaacttgctttgacaaactcaacagtgttctaccaacaacccatcattggtggcgccctcttttagattgcttatgaggtatagttcaataatgaagtgttttggatgatgtttgtggcgtcccagaaataagaaagtacatttct

SEQ ID NO: 30919 - DNA, 187 bp, Zea mays
  unsure at all n locations
  Clone ID: LIB3181-003-P1-M1-F5
agaaaagcnaggaccccggcgcggtaccgttcctccattaccgcgtccacccacgctttctttttttttcgcatactcaaaaccacgtgctggggctattcaaaacaaggtcggatacatctattaccactatcaaaaccacttcacgacacatatatttaaaacaaccccatatacaaatcatttt

SEQ ID NO: 30920 - DNA, 418 bp, Zea mays
  Clone ID: LIB3181-003-P1-M1-F7
aaaacaagagggaacggtgcggcgcctgcagacacctccccaaaattcccgattcgacccttgcttttgattcaactctactccttatttgcggctgaaacaactactaccgtgcagccaactaactcatttgagccctgctacctttttgatacaaccacagttgttgccgatctaccaccacgctacgcctaatactgacatcctattacaactgcaacaattgctgccattcaaccaacttgatttcacaaacccatcagttttctaccaacaacccattatttgtggtgccctctattagatatcttatgagttataattcaataataaagttttttgtctgatatttgtggcttcccataaataattaaatgtcatttttaaattaataaacattattattattaaattggtt

SEQ ID NO: 30921 - DNA, 361 bp, Zea mays
  Clone ID: LIB3181-003-P1-M1-F9
atggacgctctcatttctcggcgcacggcccaacttccgtcaaaatgtctactgggcatggaatgctgtacaaactcagcttggagggtgatcactctacacccccaagtgcatatgggtcagtcaaagcctacaccaactttgatgctgagcgcgatgctttgaacattgaaacagccatcaagaccaaatgtgtggatgacgtcaccattgtcaacattttgaccaacctcagcaatgcacagagacaggatattgccttcgcctaccatagaaggaccaaaaaggaactttcatcaacactgaagtcagccttatctggccaccttgagactgtgattttgggcctattgaagacacc

SEQ ID NO: 30922 - DNA, 287 bp, Zea mays
  Clone ID: LIB3181-003-P1-M1-G10
ccgatctcgattctattttttgtactcctcgtttctcttagccatcgtgtacaatcatattggctggggggacacacactctcaaccacaacatgactgagcaaattacccttcatggcaccctcaaagtccacaacgtgctcataacccatatcgctactaccccgcaattaccgcacatgatcctatcctcctttcaatataacaccatcatcatttgtaaactgaccagttatgaaaccaactattgaatttcacaactaattcttcatattcactcccacttt

SEQ ID NO: 30923 - DNA, 284 bp, Zea mays
  Clone ID: LIB3181-003-P1-M1-G11
cggatgtcatttttctctttaaaagcgacccttcagaatctgggtggtttaaatataagaacggctcgggtaacactacacctatttttcctgtaaatgggaaacccctccccataattgctttcttaaagatttctggttatagggcttctatatcccatcatatcaagttcaaaatatcccatctattttgtctttataattatttcctttatttatttcttgtcttcataatctttaacccttcatcttttctcaattctatattgtatatacttatttta

SEQ ID NO: 30924 - DNA, 262 bp, Zea mays
  Clone ID: LIB3181-003-P1-M1-G2
tcggtagttacatttggagcagtaattgggacaaaacatgaaggcacaagggctacaacaacaaagctagaaagaacgtgctacttagaacaaaatcgtcgagatgtggggcagaaataaggaacacgcaacacgggctgaaactgtggtattagaaacagtatgcataacaactgtgatgacttgtgtattgagaaaaactctcatcagcagtgtgtgctacccgaatgttcacaacaatgggatgaattagctatgacaa

SEQ ID NO: 30925 - DNA, 464 bp, Zea mays
  Clone ID: LIB3181-003-P1-M1-G3
aagctgtgccgcctgccggaacctggcctcatttacagcgtcgacaagcctgtgctggtcgacccgctcgaacgcggaccggtggacgcgctcgcccttgacgggtcctgcacccaacaccgcatgcaacagcgccgtgtaccgttgccgaagcgcctggtgcaacaccatcactatcgatcggaactatcacgcactgtgacgcgatggactcgatcgcgcgccaaaacgcgccctgcacctgcggcatccagatcgtgctgacgcagaagcgcatgtgaaggcactgggtcggtacaccttataggcagtagcggtacgcgccgcgacggacgggtcggattgaccgcgacgcgatcgccgacacttaacgacgtcacgtgcgcgtcgatcgcccgaaccgtgccgtcaacctcttggacgagcaccatttgctgctcgaggcggatcgcgccgaaaccgtc

SEQ ID NO: 30926 - DNA, 367 bp, Zea mays
  Clone ID: LIB3181-003-P1-M1-G4
aggaaaagccggccggctgccggaaccgggcctccattacagcgtcgacccatgcgttcgtgttgctacagaagaagcagcatatttgacagagtattctatacatgtggatggactaatgagaaaggatcaaatacgggcttacaaagctatgcacaacaggatgattatggggaatgtgataaagaactgaacaaccgcaacataacagtacattgcactacaaaagccatggatgttgttagcactgactaatggcagatgtctggcgtgcatctgaagagaagagatacacgagacgaatcaggtcttactgtgaaaggaatattttatggcataggacatactccaaacagaaaattgttgc

SEQ ID NO: 30927 - DNA, 205 bp, Zea mays
  Clone ID: LIB3181-003-P1-M1-G6
gaaggaacaaaaaagcacccggggacccctccgcaatttccccgattcgcacaacattttttgtttctaccccagctcaggagcaatggttccggacatatcacacaggcgcctgggtacttctataacaccacctaaattaaacctactacactacaaccttacaaacacctcctagcccacattctctcttcccccaacagaa

SEQ ID NO: 30928 - DNA, 398 bp, Zea mays
  Clone ID: LIB3181-003-P1-M1-G8
acaagaaggaacaaaaaagcaggctgatacccctccgcaattcccccgatgcgattattttttttttaaccccttttcttacacctgggaggtgcaaaaatataccagtgtgccccaacaataatacaactttcacccatacacctattataagtccgttgacccctttaaaacatcctctaagacccccatctcaccttctaaatccctaatctcctttgatatcccacccacttctatctaatccaattcattttactgttatttcctaaacaattcctccatgaagaagaatacacccctaaatacggtcaaaaattcaccaaaactgtcttctctcttttatccacctttccatgaccccacctcaactgctacaccaaaaacactacctttta

SEQ ID NO: 30929 - DNA, 224 bp, Zea mays
  Clone ID: LIB3181-003-P1-M1-G9
agagggaacgcgacagcgccttcatacacctccccaaaattcccgctcccaccttttttttctaacggatactcaatcaaattgtgattgttatacaactaacattgcccggcaacaaaaacacttcatcatgtctctttgttataatgaataagaaatatttcaagtgacaccttatcatttccactatttttcacacacacttaaactctctctgtaactca

SEQ ID NO: 30930 - DNA, 412 bp, Zea mays
  Clone ID: LIB3181-003-P1-M1-H1
tcgggcgaccctcgccggaaccaaagaggtgagccgtggctactatcgcgggcgtgatcacaacactgaacagcgtgcggatgctgtacatgggccaaggccaacataaaccccaccggccaggcgctcatagtatacacggtggctgggatggcctactctatctacagcgacaagaagaacctgtcgctggcgaagcactactcgttcgagcaagacgctgaccacctaaagaacaccttcttccaatgcacccatcgttcgcacccggctttgttgacgccgggagacgaggacttcggtcagagctatgctacctacctctatcagttagatcgtcgacagagaaagcaccaccaatgcctggataaatttaactacgaagctagctgctgaacatcgatctgctact

SEQ ID NO: 30931 - DNA, 303 bp, Zea mays
  unsure at all n locations
  Clone ID: LIB3181-003-P1-M1-H10
tcgatgccgcttttttttatttccccaacatcccacaattggctggggtctaaataccatgggcggggctaacttnccanatttacctcctgttgctgtcttgcccctgggtactaaaaataatctgtctcgatgcctaaaatcgtgatgattgatatgaatgacagaatctgtcaaagattctcaatgatttaaagacaagtaaacttgttcaatattatcgattctccctggaggtgatacccttaacaaacctaataaaatatattacccacttcccccttttaaaattcattaattaac

SEQ ID NO: 30932 - DNA, 468 bp, Zea mays
  Clone ID: LIB3181-003-P1-M1-H2
ataggaaaagctgtgccgcctgccggaaccgtgcctcatttacagcgtccacccacgctttctgtgtggcctctcgcagataattggggggtggcaaaagaaactgttagggatactgacaaacgtgggctagtcatgctgaagtatacattcaaatactcagacacattcgttgagccagatgatgattggctaaagagcattgagaatgtaagtgatgaattgcttgtggtatattcgaaggcccaagacactgcattgtcagcggccttcgtaggccgaaaaaaagcaaagactgaacccattgtttgatgctgtcgggttcgcctactccgactaccgatatctagtgcggtcgcaaaaaagaaatggtacaactttctgcgaaagaaacaactacaaatgctgctatcggggcggatcacaacagaaaaaaggtaaacgttgtcacacaccgtccacgctata

SEQ ID NO: 30933 - DNA, 148 bp, Zea mays
  Clone ID: LIB3181-003-P1-M1-H3
aaaagccgtgaccgccggccggaaccgggccgcaattacagcggccacccacgcgttcggatgaatgatatgacatcacatggatggttagaaaaaaaaaaaaagggggaagaaaccaaaaaaaaaaaaaaaaaaaaaaaacaaaccc

SEQ ID NO: 30934 - DNA, 461 bp, Zea mays
  unsure at all n locations
  Clone ID: LIB3181-003-P1-M1-H4
aaaagcgggccgcctgccggtaccgggcctcatttacagcgtcgacccacgctttcgttttctccccctccgccgcttcgtcggcggagtacccaccgggcagggtgaggacgatcctggcgtccgagacgatggacatcccggagggcgtcacggtcacggtggccgtcaagctggtcacggtggaggggccccgccgcaagctcacccgcaacttcaagcacctgaacctggacttccatctgcaggaggacggccgcaagctcaaggtggacgcctggttcggcacccgtcgcaccatggccgncattcacaccgccatttgccacgtccagaacctcatcaagggggtcaccaagggctaccgctacaagatgaggttcgtctacgcccactttcgcatgaacggctgcatcaccaacagcaacaccgccatcgagatcagaaacttgcttggcgag

SEQ ID NO: 30935 - DNA, 247 bp, Zea mays
  unsure at all n locations
  Clone ID: LIB3181-003-P1-M1-H7
agaaggaacaaaaaagcaccctgatacccctccgcaattcccccgattacacttttcttttttagccggccacataaaaccccgggctggattaaataaaaaaccggacgggtcaaancctgnacatcatccttactctccttaaacacccttacacattcactccctaacctccaaatcagtgctccataatcccatccaactttaatctccataaaccacaccatctctacctacaattctatac

SEQ ID NO: 30936 - DNA, 368 bp, Zea mays
  unsure at all n locations
  Clone ID: LIB3181-003-P1-M1-H8
aaagaangaacaaaaccgcacgctgatacccgtcctcaattcccccgatcccacttttttatttctcacctcacaacccaaccactgtcacgcttacaatacaaatacttccccgcccactnaatacccacacccttattcacttccatctacaacacagccttctctccgactctgcttctcaaactacttctgtatcctcaccactaccaacactcatactactttctacaccttctacacttccatcactaacttcatctcccttattcaccaatactatcccattactctcttttcttccaaactataattcttcctcacccataatcccctactttctcactcttaccttcaactattccttt

SEQ ID NO: 30937 - DNA, 311 bp, Zea mays
  Clone ID: LIB3181-004-P1-M1-B1
tttctttcgcgagcggccgcctttttttttggtggggttttttcgagataagactggtttgatgttctggatggtttcacgttttcaagaaaaaactttacaaatggaagaggtcagctagcttaaaagccaaaatagccactgacgctactgctccagcatatacttctcgcaaatactacttattagcaaatactacttattgtgctgatgctgacagccagcaccagctgctttttcaagccaccgaacctattatagaattaatttaaaaaacaaatactacttattgtagaagcggtgcacgtatg

SEQ ID NO: 30938 - DNA, 292 bp, Zea mays
  unsure at all n locations
  Clone ID: LIB3181-004-P1-M1-B10
ctcctttcccgcttccacccttttcttctttttcaaacattatcnccttcttacagcaacttctttaacttccattattacctcttnctttctctattcctaccaccttattacatcatcccaccatttttctttccatcttctatattttattattcttcttactctaataataaaattctcatactttttttttcatcttttcatttacaaattattatatatctatattttaatttcatttcctatttataaattcttcattttttatatttttttttcctttccttat

SEQ ID NO: 30939 - DNA, 295 bp, Zea mays
  Clone ID: LIB3181-004-P1-M1-B11
tgctttctagcgatcccactcccgatcagcagcggatcgctcactcttgcagctggatcattctttagctgccctagctctagcctctagccctagctagtagctagccactcggtcgtgtagtcatcagccttctgatcgtcacccatggccactgccgaggtccagaccccgaccgtcgtggcgaccgaggaagcgccggtggtggagaccccggctccgcccgccgtcgtgcccgaagaggctgtccccgccgccaaggtcaatgtggaggagccagttttcccttctgata

SEQ ID NO: 30940 - DNA, 351 bp, Zea mays
  Clone ID: LIB3181-004-P1-M1-B12
agggaaagcagggacgcctgcagttacctgtcctcctttccagcgtccaccttttcatctttcttcggaccctctaatatatggaaggtttctttcgcatgcatgcgaggtcatatctcttttataatgtcacctaaactcaattcactgtccatcattttacaactttcaaaactaataaaaccctcacttcacccaacttaatcaccttgcatcacattcccctttctccagctatcctaatacttaatattccctcacctatctcccttcccatcattttctcattcttaatatctaatcccacactccctttatcatttcattaagcacgcttttttcttttttatt

SEQ ID NO: 30941 - DNA, 306 bp, Zea mays
  Clone ID: LIB3181-004-P1-M1-B2
tcgtaaagacgtacgtacatgcacaaaactagagcgagctgtgtgtgtgtgtgtgcgtcatttcctcgatcatggcgaatgcgcaagcgcaggtggcggcgaggttcatgatggaggcgccgccgccgcatgtggtgtcggtcatgcggcggatgaaggcgccgaggagcctgagcaccatcgccgaggacgacagggatatgctggcgccgtgcgggtcaccgtcggaccacgggctcgtacatacacataacttgagcgagtagagataccgtgttttactgtgtagatttgtgtgtgtttatt

SEQ ID NO: 30942 - DNA, 282 bp, Zea mays
  Clone ID: LIB3181-004-P1-M1-B3
ttctagggcgtcgtcaccgcctactacgatggctccgacctggacgcggcggcgcctgctcgacgagctggacttcgagttcctgggcaaccgcagcggggagccctacatcatccagaccaacgtgtaccacagcggcgtcggcggccgggagatgcgccactcgctctggttcgaccccaccgccgacttccacacctacgccatcctctggaaccccaagcaagatctgtgttcttcgtggacaaggtggctttcctattgttccctaacgacgggtgc

SEQ ID NO: 30943 - DNA, 385 bp, Zea mays
  Clone ID: LIB3181-004-P1-M1-C1
gttaccgcaaccattttcccacattgctcacaagctcctatagctcaccttcttaccccatacctctcaccagcggtgccttcaatgtgtgtaaacccaggcgcccaaccctacaggatccaacaggcactctgaacaggcatcttaccattgtcacccttgtggctgcaacagccgccagccctattacagcacttaccttgggttcatttgctggcacaacacatccgggcgcagctgctacaacaactcgtgctagctaaccttgctgcatactctgagcaacatcagttgctgccattcaaccaactggctgcattgaactgtgctgcttatttgcaacaacaattaccattcagccagctagttgctgcctacccccagc

SEQ ID NO: 30944 - DNA, 258 bp, Zea mays
  unsure at all n locations
  Clone ID: LIB3181-004-P1-M1-C12
accccnccgcaattccccctatctctcatctttatcttcatcaacatataatctacatcagacaggtttcctaatataccgagaaagacttctcttcatcttccattcttacttctcatttttattaataactcataatttacccctattcatagtcttatattccaatacataataccctcacaccttattttcctacttattttataacaccctattatcatcttacatatttcatctacctgtccatttaatttt

SEQ ID NO: 30945 - DNA, 228 bp, Zea mays
  Clone ID: LIB3181-004-P1-M1-C2
tcgcgttgccgtagccgtgttcttgaactctgctacgtgctgccatttagacaaagctagtctccttctcctcctcttattattttcgcgccgatcagggaagaagatgacgatcaccattgaacagccccagctcgatgccgcagcggtgaggatagtccccggcggatgcgaccgcgcggagctggcgctcgacgccggctatgaccagccggacgccaacacctt

SEQ ID NO: 30946 - DNA, 225 bp, Zea mays
  Clone ID: LIB3181-004-P1-M1-D1
aaattaggaaaagctgtgaccccttaagtaacctttcatcatttacagagtcgacccattcttttttatacgacacacattatcatgtgtgatatgaccaataatatatgcatgatgataaagttttggttttaaagaaaaaaaataaaaaaaaattataaaaaaaataaaaaattaaaaattttataaatataattaatttttataaaaaaaaataataataaa

SEQ ID NO: 30947 - DNA, 313 bp, Zea mays
  Clone ID: LIB3181-004-P1-M1-D10
ctcccgcgtccaccctttctttcttcatcatacaaatcacaatacaggaagatcttttacatacaaaagatgggtccctccttattctcctttattctttcttcaattacttctacatccaccattttccttcaactctcacaagctactattacttcccttcttccccctttccttcaaccaccatatttttcttcattttttaacccatttctacaacccttcattaaccaacactcaatcacaactccctttttacctttatcaccctttttcctccaacaatcatcagacctattacatttcttacctt

SEQ ID NO: 30948 - DNA, 334 bp, Zea mays
  Clone ID: LIB3181-004-P1-M1-D3
tcttcttttcaagtggtggtgaagatggatatggaaggctgcatcattttgagtgtgactactttagcatcaaaatgtagataaagaacagacaaatcagaggctgtttgattaccaaccggctcagactcttggttcagatgttagatgcagctggcagggcatagcacatagagagcacagctagaccctaaagctgtagccgtggttgatcgaacatgctgctatggataagcagcttatctacatgctgaagctatagtggcacacttgaaaatgaagcagccttacatactgatctgcacctccacttgaaaagccggacgcgtgggtc

SEQ ID NO: 30949 - DNA, 404 bp, Zea mays
  Clone ID: LIB3181-004-P1-M1-D5
tctttctttcttaggcggtccccattgagaaaagtttgcctcccttcccgagcagaagggacatcaaccagatccgcgagatcctcccccacaggttcccattccttttggttgatagagtaattgaatacaaggctggagaatatgcagtggggatcaagaatgttacaataaatgataatttcttcccaggacattttcctgaacgccccataatgcctggtgtcctcatgttctaggctatggcccatgttgatggtctgattatgctgcaacctgaagttgtagtatctcgtaacaacttctttttcgccattattgacaaagttaggctcaggaagccagtgattgctttcgattcactgatcatgaagatgacacttactaattatcaatagaggttt

SEQ ID NO: 30950 - DNA, 417 bp, Zea mays
  unsure at all n locations
  Clone ID: LIB3181-004-P1-M1-D9
tttcttctgcaaacgtagttgcaaaccagccagagcatcttctgcaacagtttgtaccancnctcactcaactagccatggtgaaccctgccgcctacctacaacagcaacaactgctttcatctagcccgctcgctgtggccaatgcacctacatacctgcaacaacaattgttgcaacagattgtaccagctctgactcatctagttgagacaaaccctgctgcctacttgcaacagctgcttccattcaaccaactgactatgtcgaactctgctgcgtacctacaacatcgacaacagttacttaatccactagcagtggctaacccattggtcgctgccttcctacagcatcaacaattgctgccatacaaccagttctctttgataaaccctgtcttgtcgaggcagcaac

SEQ ID NO: 30951 - DNA, 194 bp, Zea mays
  unsure at all n locations
  Clone ID: LIB3181-004-P1-M1-E7
tagggaaagcttcacgcctgcaagtacctgnccgcctttcccttgtccacccattctttcttcctcaagccaaaaccctatcaggaagacctcttaaacaaaggaggagacccctnctcttccacttcatactactattacatctaaattcacattatctattcttattaacctccacaaccttttattttttt

SEQ ID NO: 30952 - DNA, 323 bp, Zea mays
  unsure at all n locations
  Clone ID: LIB3181-004-P1-M1-E8
agggaaagcttgcaggccggcaggtaccgnncctcctttccctcttccaccctttcttttttagagattgaanaangaaagcagaaagaattttttaatatgaagacagaacnatanccttctcatacttaaacatatataggatcattcctataccaccttgatgatagacagttggcaatttctcttttttattttcctttaattatccaaatccgtttctgatttccctattattaattccacaaatttaatcatcacccttcttttattaaaactttttaaacgccctacatcttttcatttttctccacctactctca

SEQ ID NO: 30953 - DNA, 389 bp, Zea mays
  Clone ID: LIB3181-004-P1-M1-F3
tttcttagagagagaggccaggaaggagggtgagagcacgggggcttgttcgaagatcgatgcctgagcatatgcggtgacgaacgccgtgacctgggcttcacaggtcacgctccttgaatataaaccggtgttttccatattgaaaacctagaccagtgttaccctacacagtgcttgccaaatgggcgaaaggcatgcaattacacacgaacaaccacactataagcgcatgatacatcaacgaccatgtccgacaacgacagttaggagcgtttcagttcagagaggacagagagagacagtgcattatcattgccagggacctacgaggcggtcacctttttggtcgacttggcggcggcggtcttcttgggtgacttcttttc

SEQ ID NO: 30954 - DNA, 440 bp, Zea mays
  Clone ID: LIB3181-004-P1-M1-G8
ccttcaggtaccgcccctcatttccagagtccaccctctcttctttttaactgttaattcatcaaaggatgggtttcttataacctaaagaggccctcccctctttcgacatacatactttcccttcatattataaccaatacatcaacataatctttctattcaatctaaactcttattctttccttactaatctccattagaattactgttattatttgctttacattatcaatatcacctactttttcattttcacccaccattaacaagattacactctgtaattctagaatactttacttaacaaagttagaatgttttttctcttttaaacatatccactccaatctttatattatataccatttcttttttttcttaatatatactattcacaaaatataaataatattcattattcttccatttattaaatt

SEQ ID NO: 30955 - DNA, 383 bp, Zea mays
  Clone ID: LIB3181-004-P1-M1-H1
agaggctaattccctttatgagacggacaaggcaacccaagaggtgatcaatgcaattgctgaagcacagacttagcagtctgggctcgctgtgaataagatctgcattggacccaacatgccaactatcaagctagatagatctgtaggcctacctgagctcagatgcccggggagaactgtcatgaagctagcatggcaatacagtctgagtgagccaccaccaccgacagatgcagacagctcatagaggatgtgtgtcgactacttaaaccgtgaactgggagcacgataatgttcattcgcccgcgtagcatgaacactatgtagcatgtggttaactttggcgtattgtttatggaagacacctataaaaacacatg

SEQ ID NO: 30956 - DNA, 389 bp, Zea mays
  Clone ID: LIB3181-004-P1-M1-H4
tttctatgaggagcaatcagcagcgctctcggcaggcacggactcgacgggcgaggagctagcaaaatggaataccagatacagggagaagtttggcttcggcttcaagatttgcgcttctgggaggactgcagctgaggtcttggctgagcttaagaggcgttatacgaacaggccaattgtcgaacttgaagctgcggcacatgaagaactcaagattactgaactacgtctcacgaagctttttttattggagcctactgttcccttcactacaactgaaggccctatcattcgatcagatatagcagcagatccgcataccgattattggagcacattttgggagctttccctcatgcctgtgccaatatagctcctgaaatttc

SEQ ID NO: 30957 - DNA, 239 bp, Zea mays
  Clone ID: LIB3181-004-P1-M1-H7
tctttctctagatccatcatgcatccttaggcaggaattcgacgctgtacaaggagtctagtcagaccgaaagtgactgcacgtgccgatatcttacaccagctgtaccagaaactccaaaccctaccccatgtgtactgacatgtagcaatagcgagcttcgccaggccgactgatatcgaactggaccgctccattgcgtgaatccgacatgctgcgcatctatttaaaaaaaagaa

SEQ ID NO: 30958 - DNA, 426 bp, Zea mays
  Clone ID: LIB3181-004-P1-M1-H9
gaaagcagcaccccggcctcacctcccctccacccccgcatccaccctctcctcctttttttaaacccaaaactaaaaaaaaagaatccttcaaaaaaaaaaaaaagaccccaacccctcccaaaaaaaaacacaataacaaacacccacactaaaacacatacaacaataagtccccccccccccacataccccaaatttccccccccctccatccaccccattaccctctctatatccccccctaatccaaatcccctcaccctccattcacccccttctctcctaaaaaacccccccctccccccaccttatcacccccccatcccatccccctcttcccaactcctcatttccccctaaaaaaccccccccattcctccttcctaacatttcctcccccctattcccacttaaacccccccc

SEQ ID NO: 30959 - DNA, 331 bp, Zea mays
  Clone ID: LIB3181-006-P1-K2-A3
ctcgtttcccgtctcggagcggcggagtgcgcacctatcagtcccaagttcccgccacacacctgggcattcccctcccgaagtcccgatcctgtcctcaaatcccattgctctatcttctctagcggcgagtcgaggcggggaagacgagctagcggcgaggatgttgtgggtagataagtaccggccgaaaaccctagacaaggtcaccgtgcacgaccaggttgctcagaacctcaggaagtttgtgtcggagctggattgcccgcacctgttgttctatgggccgtctgggtccgggaagaaaactcttattctagtgcttattaag

SEQ ID NO: 30960 - DNA, 83 bp, Zea mays
  Clone ID: LIB3181-006-P1-K2-A4
agccttccgtgctttccaagaattaaaaaagtacatttttttttttaaaaaaaaaaaaaaaaaaaaaaaaaagggggatattt

SEQ ID NO: 30961 - DNA, 78 bp, Zea mays
  Clone ID: LIB3181-006-P1-K2-B11
gaaaaacgggccgacccacgcgtacagtaattcaggaaaccgaaaacgaaccttatattcccaacaacaacagacaaa

SEQ ID NO: 30962 - DNA, 188 bp, Zea mays
  unsure at all n locations
  Clone ID: LIB3181-006-P1-K2-B3
aaaaaaaaaaaaaaaaaaaatntttnngctnntttagtttttaaattaaccaaacaaaaacccgcaccgcttttttaaaaaatatttctcacccccccaaaaatagggcccgccgtttaataggatccaaccaacctaccccctgaattcaactttaaaatccttaaatatttaaacccaataacaat

SEQ ID NO: 30963 - DNA, 376 bp, Zea mays
  Clone ID: LIB3181-006-P1-K2-B4
cggggccgcccaacgcgtccgagaacaccgaaatgccactcctgctgctcccaccaccggcgtgcaccacggcagcgacgtcgctcgctttctcgcggccccggccttcgcgggcgcgttgggccaacctctcttacgcgttcccccgcctgaggaaatacgggcgtcgccaccgcgagcccgtggccggccccagcctcgatgatgacggcggcgaggaggatgagacggaggcagaggactgggagtccgacgatggcgatgaagagatggagatagacgaggaggagtttctgacgatgcggcccaaaccggctggatttggcgaggggaaaacatattccactgacattgaggagccgtttcttcgggagat

SEQ ID NO: 30964 - DNA, 455 bp, Zea mays
  unsure at all n locations
  Clone ID: LIB3181-006-P1-K2-B5
ccgggncggcccaacccgtccggcaaaccgcactagcaacaacctaacaacatttgctaccaagatattatccctccttgcgctggttgcgctttttgcgagcgcaacaaatgcgtccattattccacaatgctcacttgctcctagttccattattccacagttcctcccaccagttacttcaatggccttcgaacacccagctgtgcaagcctataggctacaacaagcgattgcggcgagcgtcttacaacaaccaattgcccaattgcaacaacaatccttggcacatctaacaatacaaaccatcgcaacgcaacagcaacaacagttcctaccagcactgagccacctagccatggtgaaccctgtcgcctacttgcaacagcagctgcttgcatccaacccacttgctctagcaaacgtagttgcaaaccagcaacaacaaccacttg

SEQ ID NO: 30965 - DNA, 184 bp, Zea mays
  Clone ID: LIB3181-006-P1-K2-C10
ggaaaaccggccgacccacgcgtcgacaatctacaacaggtcaaccaatattgtttggcaacacacaaccaggggggatgttttctcaacatgctactcaaaagcgttgcaatctgacagacacaataccacataatgtcggttgaccactcatactccaaataatccatgcacacaatgacat

SEQ ID NO: 30966 - DNA, 438 bp, Zea mays
  Clone ID: LIB3181-006-P1-K2-C3
tagcaacatagaaagcacaatagtgtaccaacaatggcagccaaaatattttgcctccttatgctccttggtctttctgcaagtgctgctacggcgaccattttcccgcaatgctcgcaagctcctatagcttcccttcttcccccgtacctctcaccagcggtgtcttcggtatgtgaaaacccaattcttcaaccctacaggatccaacaggcaatcgcagctggcatcttacctttatcacccttgttcctccaacaatcatcagccctattacaacagttacctttggtgcatttattggcacaaaacatcagggcacaacaactacaacaacttgtgctagcaaaccttgctgcctactctcagcaacagcagtttcttccattcaaccaactaggttcattgaactctgcttcttatttgcaacaacaacaa

SEQ ID NO: 30967 - DNA, 125 bp, Zea mays
  Clone ID: LIB3181-006-P1-K2-C7
tagatttcttatgagttatagttcaattaataagttttttgtctgatgtttgtggctgagggaatatttaaaaaaatattttcaaaaaaaaaaaaaaaaaaaaaaaaaaaaaattaaaaaaatag

SEQ ID NO: 30968 - DNA, 250 bp, Zea mays
  Clone ID: LIB3181-006-P1-K2-C8
gggccccaacgcgcgcgccatggagcgttcctaggttgggctgcaggtggcgaggaacgggaaggacttttcgttctatctccacctcaattaactacttacatttggtaaatttatattaaattaattatttacttaataaattaactaaatatcttaataacataattaattaattcatttattaaaaaatattaacatattttctatattctaatttatataactatatattcactttatttatatt

SEQ ID NO: 30969 - DNA, 326 bp, Zea mays
  Clone ID: LIB3181-006-P1-K2-C9
agcaatctacaacatggttcaatccataatccaggaggagcaacaacaacaaccatgtgagttatgtggatctcaacaagctactcaaagtgcggtggcaatcttgacagcagcacaatacctaccatcaatgtgcggcttgtaccactcatactaccaaaataatccatgcagcagcaatgacattagtggtgtttgcaattgaagaattgtgtctacctagccgttatactcctataacggtgttaagcaataaagtaccatacattatgatgtttgtactatgatatttgaataagaatactaattgtaattataatgctact

SEQ ID NO: 30970 - DNA, 393 bp, Zea mays
  unsure at all n locations
  Clone ID: LIB3181-006-P1-K2-D1
naaaaaaaaaaaaaaaaaataaaaaaaaaattttattttataaaaaaaaaaaaaaaaaaaaaagagagagaataaaaaaaaaataaaaaaaaaaaaaaaaaaaaaaaaaaaaaaaaaaaaaaaaaaaaaaaaaaaaaaaaaaaaaaaaaaatattttaaaaaaaaaaaaaaaaaaatggggggggccctttttgggggaccaatttttttcccctgttttttgggagtatttttttttttttttggggccctaaaataaaaatctggggcggtttttttaaactttgggggtgggaaaccccttgttttccccatttttatgtttgtgtaaaaaatttcttttttttcggggttgggtatttataaaagggcccccctcctttttttttttaa

SEQ ID NO: 30971 - DNA, 86 bp, Zea mays
  unsure at all n locations
  Clone ID: LIB3181-006-P1-K2-D3
ccaccggggaggatcttcgacgccnnctaggcgatggaggaggacgattcatccggcggtgctagcatggacatcgtctccacagc

SEQ ID NO: 30972 - DNA, 421 bp, Zea mays
  unsure at all n locations
  Clone ID: LIB3181-006-P1-K2-D4
cgtcgagccgcgactgccgactgcgaccgatagaattctctatccggtccccgtccggtttggttagagttcgcactcgtgattgggttggtcgcttggttcttccctgccggaagatacctttcgttcggtgtcgccaactcgccattcttgggaggtcttggtcgggaccggtgctgatggaggagaggtacgaggcgctgaaggagctgggggccggcaacttctgcgtggcgaggctggtcagggacaagcggaccaaggagctggtagccgtcaagtacatcgagaggggcaagaagattgatgagaactttcatagggagatcatcaatcaccagtcgctccggcaccctaacatcgtacggttcaaggnggtttgtctaacacccacacattttgctttgtcatggaatatgct

SEQ ID NO: 30973 - DNA, 157 bp, Zea mays
  Clone ID: LIB3181-006-P1-K2-D5
acgagcccagactgccaactgcgaccgatagtaatctctatccggaccccgtccgggttggttggtgtttgaactacttttttcgcctccgcaaaagcttcttccctaccgaaagatacctattgttcggtgccaccaactagccaatattgggagg

SEQ ID NO: 30974 - DNA, 451 bp, Zea mays
  unsure at all n locations
  Clone ID: LIB3181-006-P1-K2-E10
ggccggcccacgcaaccgatngataccaactagcaacatacatagtttatatcattagcaacatcttaccaccaaggagactcattatttatgttttttcttgccctccaagctctttcaacaagtgttgctaccgtaactattatattacaatgctcacaacaatactctctttcctgtgacagccgctagatttgaatacccaactataacaatcctacaggctacatgaggccatcacagcaagcatcttacggtcattagcattttactgtccaacatccatttgctctattgcaacaaccatccttagtgaatttatatcttcaaagaaatctctattcatcaactacaacatcatattgctttcaactaataatccaaattattttcatcgtaccatgctgctttaccttcaataataatcaaattcttttcattcataacaact

SEQ ID NO: 30975 - DNA, 432 bp, Zea mays
  Clone ID: LIB3181-006-P1-K2-E2
gggcactgccagatagcatttccaagtgcaggtcgctagttgagcttaatgtgagctataatggtcttacttatctgccaaccaacattggttatgacttggtaaatctgcgaaaactctggattcatatgaacaaattgcgttctcttccatcatctgtctgtgagatgagatcgttgtatctcctggatgcccattttaatgaactatgcggtctaccatctctcttcgggaaacttagcggccttgaaattctcaaccttagcagcaacttcagtgatttgaaagagcttcctccctcgtttggtgacttgctaaatctgcgtgagcttgacctaagcaacaaccagattcatgctctccctgacacttttggtcggcttgataaactggagaagcttaacctagagcagaaccctctagtcatgccac

SEQ ID NO: 30976 - DNA, 312 bp, Zea mays
  unsure at all n locations
  Clone ID: LIB3181-006-P1-K2-E3
gccgaccgacgcgtccggaccactgccagatagcatttccaagcgcattactanagttgagcttaatgtgagctataggtcgacttacttatctgccaaccaacattggttatgacttgttaaatctgcgaaaactctggattcatatgaacaaattgcgttcttttccatcatctgtctgtgagatgagatctttgtattctcctggatgcccatattaatgaactatgcggtctaccatttcttttatagaaacttagcggtcttgaatatctcaactctatcagcatctttagttgattctaaagagct

SEQ ID NO: 30977 - DNA, 261 bp, Zea mays
  Clone ID: LIB3181-006-P1-K2-E4
ctcctccagatcttcgtgtcctccatcttcggggcgacgctgaaccaggtgctgtacttcgtgggcctcaagtccaccagccccaccgtggcgtgcgcgctcaccaacacgctgccggcgctgacgttcgtgatggcggcggcgcttaagatggagtcggtgcggccgggcacgccggcggggcaggccaagctggtgggcacggcggtgtgcgtgggccgcttcatggtcatacccttctacaagggccccgggctgggg

SEQ ID NO: 30978 - DNA, 262 bp, Zea mays
  Clone ID: LIB3181-006-P1-K2-E5
ttttcttcctccaaaccacgtgctagcctttgtggggtttaagctaaacttaattaactggccgtccgctcacaccaacacgactgcgaaaaccacgtccttgccgaccgtaattctctagatggacatgctgctgtcggccgctcccgcaataccgaacaagctcgtgcccaccgcccttcgcaacagctgctcaatctgcatacccttttacacgggccctgtactggggctttaagcgctctagtttcattggctcttt

SEQ ID NO: 30979 - DNA, 417 bp, Zea mays
  Clone ID: LIB3181-006-P1-K2-E9
attgataccaactagcaacatacatagtgatttacagtagcaacattttaacaccaaagggcggccagaattttggccttcttggccttcttggttttttaagaaggggtggttccgggaactttaattcaccatggttacacaaaataccttcttccgggaccagcgcgagatttgaatacccaactatacaatcctacaggctacaagagggcatcacagcaagcgtattacgggcgttagcattgactgtccaacaaccatatgccctattgcaacaaccatccttagtgaatctatatctccaaagaatcgcagcacaacaactacaacagcagttgcttccaacaatcaatcaagtagttgcagcgaaccttgctgcttacctccagcaacaacaatttcttccattcaatc

SEQ ID NO: 30980 - DNA, 200 bp, Zea mays
  unsure at all n locations
  Clone ID: LIB3181-006-P1-K2-F5
gcaacatanaaagcacaatagtgttccatttatgtctgccaaaatattttgctccctgatagtcggttgttataacatgtttgtgtcgctacccgcaaccatttctccacaatgctcacaagctcctatagctttccttcttcccccatacctctcaccagcggtgtcttcaatgtgtgaaaactcaattgttcaaccct

SEQ ID NO: 30981 - DNA, 339 bp, Zea mays
  unsure at all n locations
  Clone ID: LIB3181-006-P1-K2-F8
ggcagcatcgacatcatgccaaaccgatgacatggccaagaaatcgcttgaactttctacccgtagatgatttcatttctaaaccactcattgatgagcacttgagcaataccagggagataagaaagagaattcaggactccgtgctgacatagcagggcgtccatatgcttctgtatctttggcgttggaccgttggtagtaaaagatatgaatgtctcgtgatatttgtacttgtctatgcctagtctgatgtctgacgactcttccataacccataccagtccgtgcagattttcatgtgtgtgcaaccgtcttatgtctgagcagtntttttat

SEQ ID NO: 30982 - DNA, 414 bp, Zea mays
  unsure at all n locations
  Clone ID: LIB3181-006-P1-K2-G1
aacttctgctgcagcaagttcggctactgcggcacgaccgacgcctactgcggcgacgggtgccagtcgggcccgtgccgctcgggcggcggcggcggcggaggcggaggcggaggcggaggcagtggcggtgcgaacgtggctaacgtggtcagcgacgcgttcttcaacggcatcaagaaccaggccgggagcgggtgcgagggcaagaacttctacacccggagcgcgttcctgagcgccgtcaacaagtacccgggcttcgcccatggcgggacggaggtggagggcaagcgcgagatcgccgncttcttcgcgcacgtcacgcacgagaccggacatttctgctacatcagcgagatcaacaagagcaacgcctactgggacgcgagcaacaaggcagtggccgtgcgc

SEQ ID NO: 30983 - DNA, 114 bp, Zea mays
  Clone ID: LIB3181-006-P1-K2-G6
tggacgtcccttgttgctttgtattaatatttttgattgttttttttacattcttattggtggggttgttacttccttttttctttattttttattttttttacttattttttt

SEQ ID NO: 30984 - DNA, 88 bp, Zea mays
  Clone ID: LIB3181-006-P1-K2-G7
aaaaaaaaaaaaaaaaaaaaaaaaaaaattaataatttaaaaaaaaaaaaaaaaaaaaaaggggggaatatttaaaagggtcgttcct

SEQ ID NO: 30985 - DNA, 304 bp, Zea mays
  Clone ID: LIB3181-006-P1-K2-H5
aaaagatataaaaaaaaaaaaataaaaaaataaaaaaaaaaaaaaaaaaaaaaaaaaaaaaaaaaaataataaaaaaaaaaaataaaaaaaaaaataaaaagaaaaaaaaaaaaaaaaaaaaaaaaaaaaaaaaaaaaaaaaaaagaaaaaaaaaaaaagaaagaaagaatgaaaaaaaaaaaaataaaaaaaaaaaaattaaaaaaaaaaaaaaaaaaagaaagaaggaggaaagaaaaaaaaaaaaaaaaaataaaaataaataataaaaaataaaaaaaaaaaaaaagaaaaataagaatt

SEQ ID NO: 30986 - DNA, 169 bp, Zea mays
  Clone ID: LIB3181-007-P1-K2-A11
tcgaacaattgctgccattcaaccaacttgctttgacaaacccaacagcattctaccaacaacccatcattggtggtgccctcttttagatttcttatgagttatagttcaataataaagttttttgtctgatgtttgtggcttcccagaaataagaaagtacatttct

SEQ ID NO: 30987 - DNA, 92 bp, Zea mays
  Clone ID: LIB3181-007-P1-K2-A12
cacgcgtccaatcgatcaccacatacaacaccacccttttttttctacgccacacccaatcatttgaattgatgaacttactgtcattcatt

SEQ ID NO: 30988 - DNA, 446 bp, Zea mays
  Clone ID: LIB3181-007-P1-K2-A6
gaccaactagcaacatagaaagcacaatattgtaccaataatggcagccaaaatattttgcctcattatgctccttggtctttctgcaagtgctgctacggcgagcattttcccgcaatgctcacaagctcctatagcttcccttcttcccccatacctctcaccagcgatgtcttcagtatgtgaaaatccaattcttctaccctacaggatccaacaggcaatcgcagcaggcatcttacctttatcacccttgttcctccaacaatcatcagccctattacagcagttacctttggtgcatttattggcacaaaacatcagggcacaacaactacaacaactcgtgctagcaaaccttgctgcctactctcagcaacagcagttacctttggtgcatttgttggcacaaaacatcagggcacaacaactacaacaactcgtgc

SEQ ID NO: 30989 - DNA, 189 bp, Zea mays
  unsure at all n locations
  Clone ID: LIB3181-007-P1-K2-A9
accgggccgagccactctttcgctgccatacaaccggttctctttgatgtattttgtctngncgaggcagcaacccatggggggtttttccatcttttatatcacacatcacatgtactcgataatggtgccctcataccggcatgtgtttcctagaaataatcaatatattggttgagatttatctcg

SEQ ID NO: 30990 - DNA, 263 bp, Zea mays
  unsure at all n locations
  Clone ID: LIB3181-007-P1-K2-B10
cgagcagatggggctggcaaaancatttttttttgccgccaacacaacgaaccgggatagaccgttcttttttctctaacaacacacccacttcctcctaacccctacaccacctttaacctacggatggaagaaaataaagaaatcccgttggatcacttctttttcatcgaccatattcatactcgagccaaacttattatgcgttccacactagaactagaaccctctctactgctttactactctacgccccattcctc

SEQ ID NO: 30991 - DNA, 442 bp, Zea mays
  Clone ID: LIB3181-007-P1-K2-B2
agttctcccatctagcaacaccataatcgcaggagaatcgctgctccaccagactcggtttcctcttgcttcagcgtcaaaatcatggccgcagctggcaagtcgtcgtcggccatggaggagacggttgcggcgacggccgccgcgcgggggcggcgcgggattgaccggcaggccgtcgacaggggcatcgcctacctgctcatggtggccgcgctcgtcgccacctacgcgcttcactagatttcgatctgctccgctccggcgcgggcagacctcacgggaaaggaaggcttttgtgcgcttctgcttcccgccggcctcagcctcttcagagttcccctgcaccaaacttcattcgttcgtcttccaaccttgtattgtatggagaattgcagatggagatgcctgtgtctgtgtgctacatctccatacactgcac

SEQ ID NO: 30992 - DNA, 447 bp, Zea mays
  unsure at all n locations
  Clone ID: LIB3181-007-P1-K2-B3
cgcagttttcacagacagcttccacagtcactagagcactagagcagagcaacaaccgacaagagcagagtgagatcgtcgtcagcgagcccagcagatacgagagagaggatggcggacatcgcgttgctggtggcggagcagttcgagaagacggcaaggcgaggcgcccccggcggggacagcggttgcgacagcggtaccggcggcgagacgaggatacttggggccgtggccaaggtgtggagctcttgggtggagtccgtctccgccgacgtgtccggggtcagattcaccgtcgcggtgcagctggagcccaagaccgggctcgcgctggccgncgncgacggccttttctccggctagcgtcctgcttccatgtcttcctcctgagcagtgccagtggtcgagcgagtcctgctcctgcaccccgtactatgtttgtgc

SEQ ID NO: 30993 - DNA, 420 bp, Zea mays
  Clone ID: LIB3181-007-P1-K2-B6
ggccgaccgcgcgtccgagatgacggtggagggcgcgctgaagctgcttttcttttctgagggcgcgtccttcgacgggagggtgctcgctaagaactccttcctggcctactgcaaggatgaccatgacgccgttgcccagttcgaagcagcctatgacatgttgcttttgcaaagcttatcacagcggagggctggaaaggttgctaataacagcattcgctatgctgatgttaaaccttgtaaagagtgcatgagctggggcattcccacattggatgcatgcaaccatgaataatgctcctattacattcgagacgtcatcttggagtatcttgtgcatccagtcttgcgtttatggtgcactaatggtttttacgtatgctagtggaagcatcgactctttgccatctgcttcac

SEQ ID NO: 30994 - DNA, 411 bp, Zea mays
  Clone ID: LIB3181-007-P1-K2-B7
aaaaaatataaaaaggtgggcgtgcatttttttcttccttcgccgaagcctctcgacgggggcctctaacccaaccttatctcttttctcggcctctaccgccccctcgatcggtcggccggtcagctatgacgccgggaagctcggccgccggatccggcgtcgtcgttcctcggaacttcaggctcctagaagagcttgaacgtggagagaagggcattggagatgggacagtgagctatggaatggatgacgcagatgacatctacatgcgatcatggactgtcactattattggccctcataattccgtccatgagggtctcatttaccaacttaagttgttctgcgacaatgacttccctttgaagccaccatctggtcgattttattcaagaatttaacttaaca

SEQ ID NO: 30995 - DNA, 443 bp, Zea mays
  Clone ID: LIB3181-007-P1-K2-C1
cgattccgatccactcccgtcccgtccatcccgtctcgtctcgcctcgccctccacgccggcgaccggagaaggggccgtgcagcgcaggcgacgcccacaacgaatccgtccccccgcgccggcttcgcccagccccgcggcgacgcaccaggattgaaggaggcatgagaaggtggacatcattgctatagcgatttgattactggagatggtgttggtggtaaagcagcaccgctgcacacactctgcgagctgcgtttgcatcaagggccacctcagtgaggatgctctgttcctcgtcttccgccacatgaactggaacccgaggctgattgctatcttgtcgtgtgtgtgcaagtggtttgacgaggttgccaagcaggtgctgtggaaggagttctgtcatgcaagggctccaaagatgatgctggatttgcattc

SEQ ID NO: 30996 - DNA, 325 bp, Zea mays
  Clone ID: LIB3181-007-P1-K2-C10
attcagaaacacaccaagcgaagcgcactatctacgacctaacaacaatggctaccaagatattagccctccttgcgcttcttgccctttttgtgagcgcaacaaatgcgttcattattccacaatgctcacttgctcctagtgccattattccacagttcctcccaccagttacttcaatgggcttcgaacacctagctgtgcaagccaacatgcaacaacaagcgcttgcggcgagcgtcttacaacaaccaattgcccaattgcaacaacaattcttgccacatctaacaatacaagccattacaacgcaacagcaacaaca

SEQ ID NO: 30997 - DNA, 70 bp, Zea mays
  unsure at all n locations
  Clone ID: LIB3181-007-P1-K2-C6
cgcccacgcgtncgatctgttctatnggatcgtaccgntgcatcttttattaataaggaggcaagcactt

SEQ ID NO: 30998 - DNA, 422 bp, Zea mays
  Clone ID: LIB3181-007-P1-K2-C7
ccatcaatggttcaaagcaagagatcttcttttggcaggagaaataacattcgagggggggcttatacccaacggttaatggatgctagtggacaagtgtgtcgggctgagcttggtgaaccggtttaatcccagggaggttagcaaatgctttgtgcactggggaactggtgatgtgaacatggagctctggtcagaggaaagaccagtgtctaatgacacgccgttgaggatttgccaccagtatgaggtgaagcatacaacctaaacacctgcccgaagagcataaataaaaataccaatgtggaggatacttcaattgcttgcacttgttttacggtcttgtattgacggtcgcgcaccaaaacttccatggtatttttggagtcttgcgttagtcattaccctttttggaggacttt

SEQ ID NO: 30999 - DNA, 433 bp, Zea mays
  Clone ID: LIB3181-007-P1-K2-D1
caacaagcaacatagaaagtggaatacagtatcaacaatagagcaacaatggcggccaagatattttccatccttatgctccttgctctttctgcatgtgttgctaacgcgaccatttttcctcaatactcacaagctcctatagctgcccttcttcccccataccttccatcaatgaccgcttcagtatgtgaaaacccagcccttcaaccctacaggctccaacaagcaatcgcaacaagcaacttacctttatcacccctgttctttcaacaatcgccagccctatctttggtgcagtcattggtacaaaccatcagggcacaacagctgcagcaactcgtgctaccagtgatcagccaagtagctctggcaaacctttctccctactctcagcaacaacaatttcttccattcaaccaactgtctacac

SEQ ID NO: 31000 - DNA, 411 bp, Zea mays
  Clone ID: LIB3181-007-P1-K2-D10
gggccgaccacgcgtccggagaaaaggaagacagagaatgaaacttttttttagtcgccggcgccgtcgcgacagggggggggttcatgcagcgtctggggaggcccgtcgatctcttctgttgcgtgcggcgagggagtaaaaggagcctcgacaggatgcactcctttgggcaccgcgccaacgcggtggcatcgttcgcggttcaccatacttgccgcgatttgcttcgccgccttcttctccgacaacttcaacaccccgacacccactgtctccgttaagatcttgaatctaaactggttccatattgatgccaacggctactactaggttatcattgacactgaacatttcggccgtacctttcgttctttttacgtggtacacaaaaaatggtgttttttttgt

SEQ ID NO: 31001 - DNA, 388 bp, Zea mays
  unsure at all n locations
  Clone ID: LIB3181-007-P1-K2-D6
ggctacccccaacaaatttttttattcaaccaacaggcagcatngaactcgccggtttatttacagcttcaacaactactaccattcacccagctagctggtttgagccctgctacctatttgatacaaccacaattgttgccgttctaccagtacgctgtgcctaacgctggcaccctcttacaactgcatcaatagctgtcattcaaccaacttgctttgacaaactcaacatcgttctacacaacaacccatcatagttggagccctattatagattatcatgaggggggagggaataataaaattttaaatctgatgtttgcgtcttcccaaatattttaaaacacatttttaaaaaataatatataattgggctgttctttct

SEQ ID NO: 31002 - DNA, 420 bp, Zea mays
  Clone ID: LIB3181-007-P1-K2-D9
gtccgagcagcggcggaggagagagatttttcttggccgaccacaaggaggagcctggggcggagtctgtgatggacaagatcaccgagaagttccacggcggggactcgtcgtcgtcgtcgtctgactcggacgacgagaagaaggggtcctcgttggcgtcggcggcggaagccatgaaggccaagatctaccgccttttcggccgggagaggcccgtccactccgtcctcggcggcggcaagcctgccgatcttatcctatggaggaacaggaagatctctggcggggtacttgctggtgccacggccatctggctcctattcgaggtcatggagtaccatcttctcaccttggtgtgccactgtctcattctctcgctggacatcctcttgctgtagtccaatgccttcactttca

SEQ ID NO: 31003 - DNA, 441 bp, Zea mays
  Clone ID: LIB3181-007-P1-K2-E1
ggcgtcgttctcggaggctccccccgggaacccgaaagccggcgagaagatctttaagaccaagtgcgcgcagtgccacacggtcgacaagggcgccggccacaagcaaggtccaaacttgaacggtctttttgggagacagtcgggtaccactgcaggctactcctactctgcgggaaacaaaaacaaggctgtagtctgggaagaagacactttgtatgagtacctgcttaaccctaaaaagtacattcctggaaccaagatggtcttccctgggctgaagaagccgcaggagcgtgctgatctcatcgcgtacctgaaggaagcaactgcatagttcattgacatgccttttgccatgaagagaaaaattgttttgcagtttaataaaaaacattttagacaatttgggtcaccctgtttgaacagggtgcaaccacg

SEQ ID NO: 31004 - DNA, 153 bp, Zea mays
  Clone ID: LIB3181-007-P1-K2-E11
atcagactcacatcactagtaacgccttcttcaccgcgttgagaggcgccgcgacgcggaaggctagggctctcaaggaggtgtggaacatcgcggcggttatcccggtggagaagggcccgggcccggtcggcggttgtggccaccaacgcc

SEQ ID NO: 31005 - DNA, 270 bp, Zea mays
  Clone ID: LIB3181-007-P1-K2-E12
gacccatcgtcctcgtactcttgttgtttgttgcttcccatattttagaaagtacatttctagattcttggggaaaaattttaaaaatttaaaaaaaaataaatgaaaaataaaatataaattaataaaaaaaataaataaaaaaaaaataccctaaaaaaataataaataaaaataaaaaaaaataaaaaaaatatatataatgtgctctcttctttttaattataaattttattattactttccattcaatttaatattttttatttt

SEQ ID NO: 31006 - DNA, 238 bp, Zea mays
  Clone ID: LIB3181-007-P1-K2-E2
ccttcctttagatcgcaagcggccaccctttttattttttttttaaatgaccagaatgaacaattgagaggaaattaaaaaagtatttttccaaaaaaaaaaaaataaaaatataataaaaattattaaaataaataatataaaaaaaaataatataaaaaaaaaataattaataaaaaaaaaaaaaaataatatttttaaaaaaaataaatggtcggtcctataaaaatatccaaaa

SEQ ID NO: 31007 - DNA, 535 bp, Zea mays
  unsure at all n locations
  Clone ID: LIB3181-007-P1-K2-E6
gacccacgctgtccgctgatcactcgttctctcttccgtcccccgcttgctgtccgctgcctctcgctccctcgtcttccctgttgagtggcgagctctcgtgcgtgcacgtcgtgatattgacctacccttctaaggcgtctttgcttgacatggaatgagttgcataatgttccagtaagtaacattctacaaagtatggtggtttctgtgtcctgtagaccatcggtgtaaaaatgagcatatgacctancacctgtttggactctatatagttcttgggattacttcaaatttttgtgtgtcatttggatcccatccttgttccatgatatatcagtgaccagcgacaaagcggttgggcttggccctgatattcacttgagctgaaaaccagataatttatctgttccgtgagctgggaggcagtaatctgtgttgtgtagcaaacttgttcatggatatgtagtgcgaatgtcactactgttctgtttgcagtatcaaaagagtttaaactgatgttgtatccatgcaa

SEQ ID NO: 31008 - DNA, 315 bp, Zea mays
  Clone ID: LIB3181-007-P1-K2-E7
tgaactctcctgcttatttacagcagcttcttctactaccattcagccagctagctggggtgagccctgctaccttcttgacacaaccacagttgttgccgttctaccagcacgctgcgcctaacgctggcaccctcttacaactgcaacaattgctgccattcaaccaacttgctttgacaaacctagcagtgttctaccaacaacccatcattggtggtgccctcttttagatttcttatgagttatagttcaataataaagttttttgtctgatgtttgtggcttcccagaaataagaaagtacatttctag

SEQ ID NO: 31009 - DNA, 397 bp, Zea mays
  Clone ID: LIB3181-007-P1-K2-E8
gttgcaaataagaacaactaccattcagccttctatctgctgcctacccccagcaatgtcttccattcaaccaactgacagcattgaactctcctgcttatttacagcagcaacaactactaccattcagccagctagctggtgtgagccctgctaccttcttgacacaaccacagttgttgccgttctacctgcacgctgcgcctaacgctggcaccctcttacaactgcaacaattgctgccattcaaccaacttgctttgacaaacccagcagcattctaccaacaacccatcattggtggtgccctcttttagatttattatgagttatagttcaataataaagttttttgtctgatgtttgtggcttcccagaaataagaaagtacatttct

SEQ ID NO: 31010 - DNA, 420 bp, Zea mays
  Clone ID: LIB3181-007-P1-K2-E9
ccggtttccccccaaacccgtccgagaggcattcatcccgccgcgatgagggccaaggtgagcttccctcccgtcttacgaatctcgttgcgccgctatctgtttcgtctcgtagtggcctcgcgccgtgcggttctctgtgatgagcaaacagatgacgagtccgatcgaatccattccattacaccatgtggacaaccgaggcatttgtctgagagaacccaccgttcttgctgtattgatgctagtatttttttttggtgtttcctagtgtcgttcggttgtttgttttgcctttatttatttatttattttttggttggcatgatgaggaaagaaatacaagtctgatctgctagatgagaaattcctcctactcattctgaatgccgacgttccaactatgtattgcactaatgt

SEQ ID NO: 31011 - DNA, 459 bp, Zea mays
  Clone ID: LIB3181-007-P1-K2-F10
tcgaacacaccaagcgaagctcactagcatcttctctaacaacaatggctaccaagatattagccctccttgcgcttcttgccctttttgtgagcgcaacaaatgcgttcattattccacaatgctcacttgctcctagtgccattattccacagttcctcccaccagttacttcaatgggcttcgaacacctagctgtgcaagcctacatgctacaacaagcgcttgcggcgagcgtcttacaacaaccaattgaccaattgcaacaacaatccttggcacatctaaccatacaaaccatcgcaacgcaacagcaacaacagttcctaccagcactgagccaactagctgtggtgaaccctatcgcctacttgcaatagcagatgcttgcatccaacccacttgctctggcaaacgtagcttcataccaacaacaacaattgcaacagttttttacca

SEQ ID NO: 31012 - DNA, 438 bp, Zea mays
  Clone ID: LIB3181-007-P1-K2-F2
tgatgaccactgtccatgccatcactgctacccagaagactgttgatgggccctcgtctaaggactggaggggtggaagggctgctagtttcaacatcattcccagcagcactggagctgctaaggctgttggcaaagtgcttcctgtccttaacggaaagttgactggaatgtctttccgtgtcccaaccgtcgatgtttctgttgttgatttgactgttaggcttgagaagtcagcaacctatgatgagatcaaggctgcggtcaaggccgaggcagaaggtagcctcaagggcatcctgggttacgttgaggaggaccttgtttccaccgatttccagggtgacagcaggtctagcatctttgatgctaaggctggcattgccttgaacggcaacttcgtgaagctcgggttctggtacgacaacgagtggggat

SEQ ID NO: 31013 - DNA, 429 bp, Zea mays
  Clone ID: LIB3181-007-P1-K2-F6
gtcagctcatttgctccacattgaatgggtgtaacagaacttttggagatgtttgtttttagccctgtagaatgaccaaagatgtctaaaatgccgatcattgttgagatatcctgatgagagggccgcatgaacaaaacaacatcatcagcatagaaggagatacaatgtttcgcatgttgatttgcaatcggctgcaggatatgttccctgaaagcataactgaccatagcattcaaagcctccatgacaagaataaacaacatgggggacaaaggatcgccttgccgaagaccccgatgatgcagaatgtattccccaggctcaccattaacaaggatccgtgtagaggaagtgcaaaacagtagactaataaggttgcaccagattcgaccaaattccaagtgttgtaacatgtcaagcaggaat

SEQ ID NO: 31014 - DNA, 357 bp, Zea mays
  Clone ID: LIB3181-007-P1-K2-F7
ctggaagagtcaggtttgaacctcgaagtgttcagctcctcgctgtggcagctggaagcggggtgaacatttttgatgttgaaaagcaatccagcttaccctgccctccaaagggtcacaatagtgaggtaaactttgtgtcctgggatgaaaatggtgaatatctggcatctgtaagtcaggacactgtgaaagtgtggtcggtatcgtctggtgtgtgcattcatgagttacgatccaatggaaaccaatatcagtcatgcacattccatcctagatacccgaaagtgttgattgttggtggttatcagactctggagctgtggagcttatcagataaccagagaatcccaatcc

SEQ ID NO: 31015 - DNA, 313 bp, Zea mays
  Clone ID: LIB3181-007-P1-K2-F8
attgagaccaacaagcaacatagaaagtggaatccagtagcaacaatagagcaacaatggagaccaagatattttccctccttatgctccttgctctttctacatgtgttgctaacgcgacaattttccctcaatgctcacaagctcctatagcttccctttttcccccataccttccatcaattatagcttcagtatgtgaaaacccagctcttcaaccatataggcttcaacaagcaatcgcagcaagcaacatacctttatcgcccttgttgtgtcaacaatcgccagccctatctttggtgcagtcatt

SEQ ID NO: 31016 - DNA, 428 bp, Zea mays
  Clone ID: LIB3181-007-P1-K2-G1
agaacatgtgatattgataccgaagcagcgtttattattatgatgatgatgttatataccacacatctgtttggctgaggtatggtcactttttgggtcatcaggttgcatgctgggaaagcacagatgtgaaaccgccgcgggtaaggtggtctccaggatccttgatgttcgtgacaggaacgtcggaactgtcctgctgggtgccggatttgtccaagctggagtccttcaccatcagccacaccaacaccaggtccagctcgtccctgtaggcttggaccgatttgcatgccgtgtggctggttgacgcgactccatcaagagcaggaggaacaagaaagcatagcggagcatcttgtacgaatgagttgtgatggttggattctgttcctgatggggcccggtaagatactctcgcaacgatt

SEQ ID NO: 31017 - DNA, 176 bp, Zea mays
  Clone ID: LIB3181-007-P1-K2-G11
gcggccgcccttttttttttttttctttatttttttttctttttttttttttttttttttttttttttttggggggaatttctttttttttgaactatacctcataaaaaatttaaaagagggccccccctattttgggtttttgttaaaacactttttgttttttaaaaacaagt

SEQ ID NO: 31018 - DNA, 454 bp, Zea mays
  Clone ID: LIB3181-007-P1-K2-G4
ggccggccggttccctcgtcgctgcccctgtccctgctgctgctcctcttcctgtgctgctccggcacctcgtggggatggagcacgtcccggggaggagccgccagggagtgcggcttcgatggcaagctggaggccctggagccgcgccacaaggtgcagtctgaggccggctccgtccagtacttcagccggttcaacgaagccgaccgggagctcacctgcgccggcatcttcgccgtccgcgtcgtcgtcgacgccatgggcctcctgctccctcgatactccaacgtccattcgcttgtctacatcgtccaagggagagggatcattgggttctcgtttccgggatgccaagaggagacccagcagcagcagtatggatacggatatggatatggacaccatcaccatcagcatgaccaccacaagatccaccgattcgagcagggcg

SEQ ID NO: 31019 - DNA, 441 bp, Zea mays
  unsure at all n locations
  Clone ID: LIB3181-007-P1-K2-G5
gcgtccnnaccaactagcaacatataaagcacaatagtttatccaacaatggcagccaaaatattttggggggttatgctccttggtctttctgcaagtgctgctaccgcaaccattttcccacaatgctcacaagctcctatagcttcctttcttcccccatacctctcaccagcggtgtcttcagtatgtgaaaacccaattcttcaaccctacaggatccaacaggcaatcgcagcaggcatcttacctttatcacccttgttcctccaacaaccgtcagccctattacagcagttacctttggtgcatgtgttggcacaaaacatctaggcacaacaactacaacaacttgtgctaggaaaccttgctgcctactctcagcaacagcagtttctttcattcaaccaactggcttgattgaaccttgctggttatttg

SEQ ID NO: 31020 - DNA, 443 bp, Zea mays
  Clone ID: LIB3181-007-P1-K2-G6
gttgccgtacgtgcctaagctagcttcgtcttctcgttgcacgtacgtagtagctagacaggcgaatcggctctctagctagctcctcccttccgatcgatatcatcgccatgtcggggatctcgctggcggtggcgccaaggtccgacccggaccacgggtcggagcggcagccgacggcgatgctgggcggcgtgatgggctcgctccgcgtcatcgagctgcagctggtggccttcatcatggtgttctcggcgtcgggcctcgtcccgctcatcgacctcgtgttccccgtcgccaccaccgtgtacctcctcgccatctcccgcctcgccttcccgccgctgcacgccaccaagtcgtccaagcctgatgacgccgccggctctgccgccgtcttcttccagtcgttcccagagatctttcgcggcagcaagcctgtt

SEQ ID NO: 31021 - DNA, 298 bp, Zea mays
  Clone ID: LIB3181-007-P1-K2-G7
cccacgcgtccgcgttgcagttgtatcgtgttcatggtcctgggagttgttgcatgcgtgcggggcgcgctttttaggtcaggcgtcgtgtgcgatgtttgtggggtcaggctggcatgtcatgccgtgcgtgaccctgattgcgagccggcaagcaagcaagaaaaaaaaactaaagccgtgtgggaaaatggaggaggcaggcgtacaagctacgctctcccgcccactgttgcttttataatttatcatcatcttcattccgatcggtgattaatcgaaaagtatattgtaatgt

SEQ ID NO: 31022 - DNA, 411 bp, Zea mays
  Clone ID: LIB3181-007-P1-K2-G9
cgcccctgtctctccccgccgccaccctgtctctctggcgccgtagagcacggcgctggcccgtgggttccctcccccggccggacctcggaagtatgtctcgggccatcgaatcgacaatgaggcaatctcggcagtttgtgaatctgatcatgaccaatctttacaacggcgccaagtccctgcacttcgtggacctgaagcggcagccactatttaagacaccactgccacctacggcatctacagacggagacagatttgaaacacaagacgctttctctcagacacagccaactgaatccttggtgttggagagacttcgcctttcccgttcgagctttcaattcgaaactttcacttgacaagatcgcagctggtacattaactgcttaccgatttccgatcgcg

SEQ ID NO: 31023 - DNA, 347 bp, Zea mays
  Clone ID: LIB3181-007-P1-K2-H1
ccacgcgtccgaaaaaaaaaaaaaaaaaaaatgaaaaaaaattttttataaaaaaaaaaaaaaaaaaaaaaaaaagaggaaatatttaaaattatataaaaaaacaaaataaaaatctttttcataaaaaaaaaaaaaaaaaaaaaaaaaataaaatataattaaaaaaaataaaaaaataatataaaaaataataaaaaaaaaaatagggggggcccttttttaggttaccaatttttcttcccctttcttggtaataatattttttttttttggtgccccaaattatattttctcccccctcttttaaacacctttttttttgaaaaacctggggctcccccaat

SEQ ID NO: 31024 - DNA, 266 bp, Zea mays
  Clone ID: LIB3181-007-P1-K2-H11
ccccgtccccgttttccacttttgccttcttctccaattcggataacaaacccctccgcctggttgtgtctcctcccagccgagccgatccggtagagagagggagagggagggactgagggaggaggagctgggttccggtcccggccgtccggtcggctgcgcgattcgattgcagctttcgttccctggcggtgtccaagattgtgcggggcaagacgcatttgaagctgttagagaacccgaccagccgcctggtcaccttt

SEQ ID NO: 31025 - DNA, 236 bp, Zea mays
  Clone ID: LIB3181-007-P1-K2-H3
aggaagcaggcgggcaccatggtgaaagttttctcgggacagcgcgacaggctctacgtgcggggtaccatccttggatacaagacgttcaagtcgaaccaatacgagaccacgttgctcgttcagatgttgggggtgaacaccaatgatgacctcgcgtggtacactggaaagcgcattgtgtacatttacaaagtttagaccaatatcatggttacccgttacaggtgcatctg

SEQ ID NO: 31026 - DNA, 439 bp, Zea mays
  Clone ID: LIB3181-007-P1-K2-H4
agccgatctaggagtgattctcctgatgggtcacccaaacgcataagacgtggacggggttttactcaacgctattcatttgcaagacaatatcgctcaccttccgctgatcgcttgcatcgttatggcggaagaaatgaccgtgacagatacatgggttaccggggtttccgccaccgatcacctcgacggtataggagcccctctagaggcagagtgtcatcgccaaggtacaggaggaggagccgaagcgcatcacgcagtcctgtccacagaggaaggagaggtgggtacaacaagagtcctgtacggagccgttcaccccccgccaggaaaaggtcacctagcgatcgtgcacggtcagtttccaagagccacctttctaggtcagtatcaaagtctccaccagtgcatcatccctccccacttgattcttcat

SEQ ID NO: 31027 - DNA, 93 bp, Zea mays
  unsure at all n locations
  Clone ID: LIB3181-007-P1-K2-H5
tggaaaacccgaccgacgcgtccgnaaaaaaaaatataataaataaaataaaaaattttatttataaaaaaaaaaaaaataaattgggggggg

SEQ ID NO: 31028 - DNA, 239 bp, Zea mays
  unsure at all n locations
  Clone ID: LIB3181-007-P1-K2-H8
agggccgaccggngcgcgcgagaacagcgcgaggccgcatgccccgattttttttcccgcggcgatcgggccgctaatacgcgagctttttaagatcctcgccgacacccccagcgaaaaccccgccatgatcaagttctcccgcaagaaccccaggcccacctgcaacggcccgtatccctacacccccttcattttaagcgccgacacggaagaaccacccgaacatctttgtcctt

SEQ ID NO: 31029 - DNA, 264 bp, Zea mays
  Clone ID: LIB3181-007-P1-M1-A1
tctgggacccaggggcccgagccgcccacgcgactttttagctcttttatggtgaaaaaggagtttatcataaggttcttataaagtcatcattgtgagtggatacattatctattctcataccttcatcacttagcaatataaaatcccgtatgaagatcacttatttctttcctttaagccaaggttgagatttgcccgtccaatttgcatttacatacctgggttacccttactcagttttcgctttaaaaaagacttgtg

SEQ ID NO: 31030 - DNA, 169 bp, Zea mays; identical to SEQ ID NO: 30986
  Clone ID: LIB3181-007-P1-M1-A10

SEQ ID NO: 31031 - DNA, 385 bp, Zea mays; identical to SEQ ID NO: 21874
  Clone ID: LIB3181-007-P1-M1-A5

SEQ ID NO: 31032 - DNA, 132 bp, Zea mays
  Clone ID: LIB3181-007-P1-M1-A9
cacctacacgcttaactagacttgcatctggatccgctcattaacgcgcagacctgacggggaaggaaggatcttgagcgcttctgtttccagccggcctaagcctgttcagagttgctttgtaccaaactt

SEQ ID NO: 31033 - DNA, 400 bp, Zea mays
  Clone ID: LIB3181-007-P1-M1-B1
agttctcccatctagcaacaccataatcgcaggagaatcgctgctccaccagactcggtttcctcttgcttcagcgtcaaaatcatggccgcagctggcaagtcgtcgtcggccatggaggagacggttgcggcgacggccgccgcgcgggggcggcgcgggattgaccggcaggccgtcgacaggggcatcgcctacctgctcatggtggccgcgctcgtcgccacctacgcgcttcactagatttcgatctgctccgctccggcgcgggcagacctcacgggaaaggaaggcttttgtgcgcttctgctttccgccggcctcagcctcttcagagttcccctgcaccaaacttcattcgttcgtcttccaaccttgtattgtatggagaattgcagat

SEQ ID NO: 31034 - DNA, 398 bp, Zea mays
  Clone ID: LIB3181-007-P1-M1-B2
cgcagttttcacagacagcttccacagtcaccagagcactagagcagagcaacaaccgacaagagcagagtgagatcgtcgtcagcgagcccagcagatacgagagagaggatggcggacatcgcgttgctggtggcggagcagttcgagaagacggcaaggcgaggcgcccccggcggggacagcggtagcgacagcggtaccggcggcgagacgaggaacttcggggccgtggccaaggtgtggagctcttgggtggagtccgtctccgccgacgcgtacggggtcagattcaccgtcgcggtgcagctggagcccaagaccgggctcgcgctggccgtcgccgacggcctcttcttcggctagcgtcctgcttccatgtcttactgctgagcagt

SEQ ID NO: 31035 - DNA, 371 bp, Zea mays
  Clone ID: LIB3181-007-P1-M1-B3
cgattccgatccactcccgtcccgtccatcccgtctcgtctcgcctcgccctccacgccggcgaccggagaaggggccgtgcagcgcaggcgacgcccacaacgaatccgtccccccgcgccggcttcgcccagccccgcggcgacgcaccaggattgaaggaggcatgagaaggtggacatcattgctatagcgatttgattactggagatggtgttggtggtaaagcagcaccgctgcacacactctgcgagctgcgtttgcatcaagggccacctcagtgaggatgctctgttcctcgtcttccgccacatgaactggaacccgaggctgattgctatcttgtcgtgtgtgtgcaagtggtttgacga

SEQ ID NO: 31036 - DNA, 387 bp, Zea mays
  Clone ID: LIB3181-007-P1-M1-B5
tcttgatgacggcggagggcgcgctgaagctgctcggcgtcgctgagggcgcgtccttcgacgaaatcctgcgcgctaagaactccgtactggcctcctgcaaggatgaccaggacgccgttgcccaggtcgaagcagcctatgacatgttgcttatgcagagcttatcacagcggagggctggaaaggttgctaataacagcatccgctatgctgatgttaaacctgtaaagagtgcaggagctggggcagtcccacagtggatgcaggcaaccatgaagaatgcacctattacattcgagactccatcttcgagtagcttgggcatccagtcatgtgtttatggtgcactaatggatttcacgtatgctagtggaagctcgacat

SEQ ID NO: 31037 - DNA, 393 bp, Zea mays
  Clone ID: LIB3181-007-P1-M1-B7
agttctcccatctagcaacaccataatcgcaggagaatcgctgctccaccagactcggtttcctcttgcttcagcgtcaaaatcatggccgcagctggcaagtcgtcgtcggccatggaggagacggttgcggcgacggccgccgcgcgggggcggcgcgggattgaccggcaggccgtcgacaggggcatcgcctacctgctcatggtggccgcgctcgtcgccacctacgcgcttcactagatttcgatctgctccgctccggcgcgggcagacctcacgggaaaggaaggcttttgtgcgcttctgcttcccgccggcctcagcctcttcagagttcccctgcaccaaacttcattcggtcgtcttccaaccttgtattgtatggagaat

SEQ ID NO: 31038 - DNA, 282 bp, Zea mays
  Clone ID: LIB3181-007-P1-M1-B8
tttcgattccgatccactcccgttccgtccatcccgtttcgtctcgcctcgcccttcacgccggcgaccggagaaggggccgagcagcgcatgcgacgcccacaacgaatccgtccccccgcgccggcttttcccagcctcgcggcgactcaccatgattgaaggaggcatgagaaggtggacatcattgctatagcgatttgattactggagattgtgttggtggttaagtattaccgctgtacacactttgtgagctgcgtttgcatcaagggccacctt

SEQ ID NO: 31039 - DNA, 400 bp, Zea mays
  Clone ID: LIB3181-007-P1-M1-B9
ttgtgattggtttctactagcggacccatgcgtaccgtctcgtgtagcctaggccttcacgccggttatagggagaccgaaacgtaaatcgctggcggctcctacaacgcatccgtactggtgagccggctttgaccagccttgttgcgacgcacgatgattgaaggaggcatgacaggggaaccggagatgttaacatgtttctttgctcagaagaaagaccatggtctaatgacacggcgtttaggactctccacgctgctgaggtgtagcggacaacctaaacaccttgcctgtgagcagaaataaaaataccaatttggaggatacttcagttgcttgcacttgttttacgggctttgtattgacggtcgggcaccaaaacttgtatggtatattg

SEQ ID NO: 31040 - DNA, 357 bp, Zea mays
  Clone ID: LIB3181-007-P1-M1-C3
caacaagcaacatagaaagtggaatacagtagcaacaatagagcaacaatggcggccaagatattttccatccttatgctccttgctctttctgcatgtgttgctaacgcgaccatttttcctcaatactcacaagctcctatagctgcccttcttcccccataccttccatcaatgaccgcttcagtatgtgaaaacccagcccttcaaccctacaggctccaacaagcaatcgcaacaagcaacttacctttatcacccctgttctttcaacaatcgccagccctatctttggtgcagtcattggtacaaaccatcaaggcacaacagctgcagcaactcgtgctaccagtgatc

SEQ ID NO: 31041 - DNA, 384 bp, Zea mays
  Clone ID: LIB3181-007-P1-M1-C4
tcgattcagaaacacacaaagcgaagtgtacttgcatcgacctaacaacaatggctaccaagatattagccattcaagcgattgttggcctttttgcgagcgcaacaaatgcgaaaattattgcacaacgctaactagctgctagggccattattccacagttgctagcaccagttacttcaatgggcttcgaacacctagctgtgcaagccaacatgcaacaacaagcgcttgcggcgagcgtcttacaacaaccaattgcccaattgcaacaacaatccttgccacatctaacaatacaagccatcacaacgcaacagcaacaacagttcctaccagcactgagccacctagccatggtgaaccctgccgcctacttgcaag

SEQ ID NO: 31042 - DNA, 360 bp, Zea mays
  Clone ID: LIB3181-007-P1-M1-D12
ttctcggtttccccccaaacccgtccgtgaggcagttatcccgccgtgatgagggccaaggtgagcttccctcccgtcttacgaatctcgttgcgccgctatctgtttcgtttattagtggccttacatcctgcggttctttgtgattagcatacagatgacgatgtctatcgaatccattccattacaccatgagtacaaccgtggcatttgtctgagagaacccactgttcttgctttattgatgctagaatttttttttggtgttttctagcgacgtttggttagtttgtttgcctttatttatttatctatttttaggttggcatgatgaggaaagatatacatgtttgatctgtt

SEQ ID NO: 31043 - DNA, 388 bp, Zea mays
  Clone ID: LIB3181-007-P1-M1-D3
ggcgtcgttctcggaggctccccccgggaacccgaaagccggcgagaagatctttaagaccaagtgcgcgcagtgccacacggtcgacaagggcgccggccacaagcaaggtccaaacttgaacggtctttttgggagacagtcgggtaccactgcaggctactcctactctgcgggaaacaaaaacaaggctgtagtctgggaagaagacactttgtatgagtacctgcttaaccctaaaaagtacattcctggaaccaagatggtcttccctgggctgaagaagccgcaagagcgtgctgatctcatcgcgtacctgaaggaagcaactgcatagttcattgacatgccttttgccatgaagaggaaaattgttttgcagtttaat

SEQ ID NO: 31044 - DNA, 387 bp, Zea mays
  Clone ID: LIB3181-007-P1-M1-D8
tcggtccgagcagcggcggaggagagagagagagcatggccgaccacaaggaggagcctgtgccggagtctgtgatggacaagatcaccgagaagttccacggcggggactcgtcgtcgtcgtcgtctgactcggacgacgagaagaaggggtcctcgttggcgtcggcggcggaagccatgaaggccaagatctaccgccttttcggccgggagaggcccgtccactccgtcctcggcggcggcaagcctgccgatcttatcctatggaggaacaggaagatctctggcggggtacttgctggtgccacggccatctggctcctattcgaggtcatggagtaccatctcctcaccttggtgtgccactgtctcatcctctcgctgg

SEQ ID NO: 31045 - DNA, 315 bp, Zea mays
  Clone ID: LIB3181-007-P1-M1-D9
tgaactctcctgcttatttacagcagcaacaactactaccattcagccagctagctggtgtgagccctgctaccttcttgacacaaccacagttgttgccgttctaccagcacgctgcgcctaacgctggcaccctcttacaactgcaacaattgctgccattcaaccaacttgctttgacaaacctagcagtgttctaccaacaacccatcattggtggtgccctcttttagatttcttatgagttatagttcaataataaagttttttgtctgatgtttgtggcttcccagaaataagaaagtacatttctag

SEQ ID NO: 31046 - DNA, 393 bp, Zea mays
  Clone ID: LIB3181-007-P1-M1-E1
tctagatcgcgagcgggctccctttttttacctttaagccatcgcgaagatctttaagaccaagtgcgcgcagtgccacacggtccacaagggcgccggccacaagcaaggtccaaacttgaacggtctttttgggagacagtcgggtaccactgcaggctactcctactctgcgggaaacaaaaacaaggctgtagtctggggagaagacactttgtatgagtacctgcttaaccctaaaaagtacattcctggaaccaagatggtcttccctgggctgaaaaagccgcaagagcgtgctgatctcatcgggtacctgcaggaagcaactgcatagttcattgacatgccttttgccatgtagagaaaaaatgttttgtagtttaataaaaa

SEQ ID NO: 31047 - DNA, 380 bp, Zea mays
  Clone ID: LIB3181-007-P1-M1-E10
tcgatcagactcacatcactagtaacgccgccgccaccgcgttgagaggcgccgcgacgctgaaggcgagggctctcaaggaggtgtggaacatcgcggcggttatcccggtggagaagggcccgggcccggtcggcggaggaggccaccaacgccagaagcacggcgcgcccaagcagcagcagcagctgcaccgcaagatggatagcgacggcagcagcgtcagcgacctctcgctggaggaggagaacagcttcctcggcatctgcagccaggagctgcttgctcgcggcaccgagctcctcaaacgcacccggaaaggcgctctgcactggaaggtcgtgtcggtgtacatcaaccggatgggcctggtgatgctg

SEQ ID NO: 31048 - DNA, 384 bp, Zea mays
  Clone ID: LIB3181-007-P1-M1-E11
tcgctgatcctcgttcctctccgccccggttgcgccgcgcctccgtccccgtctcctgtgagatcagctccggcggcacgcggatatgactacttcaaggcgtcttgctgacaggaagagtgcaaagttccagaagaacatcacaaagaggggttctgtgcctgagaccacggtgaaaaagagcaatgactaccctgttggacctatagttcttggattcttcatttttgtgggcattggatcatccttgctccatataatcaggacagcgacaagcggtgggctggcctgaattcactgagctaaaaccagaaatttatctgtccgtgagctgggaggcagtatctgtgttgtgtaacaaacttgttcatggatatttagtgc

SEQ ID NO: 31049 - DNA, 386 bp, Zea mays
  Clone ID: LIB3181-007-P1-M1-E2
tcgtctagatttcgagcgggctcccttcgggaacccgtaagccggctagaagatctttaataccaattgcgcgcaatgcctcactttcgacaagggcgccgttcacaagcaaggtccaaacttgaacggtttttttgtgagacagtcttttaccactgttatcttctccttcttttttggaaacaaaaacaaggctgtagtttgtgaagaagacacttttgttgagttcctgtttaaccctaaaaagtacattcctggaactaagatgtgcttcccttggcttatgaagtcgtatgtgcgtgtttatcttattttgtacctgttatgaatgcaatttgcattattttattgacatgctcttatgccatgtagagataaattttttt

SEQ ID NO: 31050 - DNA, 335 bp, Zea mays
  Clone ID: LIB3181-007-P1-M1-E3
tcgctggaagagtcaggtttgaacctcgaagtgggcagctcctcgctgtggcagctggaagcatggtgaacatttttgatgttgaaaagcaatccagcttaccctgccctccaaagggtcacaatagtgaggtaaactttgtgtcctgggatgaaaatggtgaatatctggcatctgtaagtcaggacactgcgaaagtgtggtccgcatcatttggtgtgtgcattcatgagttacgatccaatggaaaccaatatcagtcatgcacattccatcctagataccccaaagtgttgattgttggtggttatcaaactctggagctgtggagctta

SEQ ID NO: 31051 - DNA, 382 bp, Zea mays
  Clone ID: LIB3181-007-P1-M1-E5
cggacgcgtggggtatgtggcttcccagaaataagaaagtacatttctagattcttaaaaaaaaaaaaaaaaaaaaaaaaaaaaaaaaaaggaaagaaaaaaaaaaaaaaaaaaaaaaaaaaaaaaaaaaaaaaaaaagccgaggaaaaaaaaataaaaaaaaaaagaaaaaaaaaaaaaaaaaaaaaaagggggggccccttttaaagaaccaaagttaacaaccccggcaatgcaacgtaatagttttataataagataaacaaaaaaaaataaagggccgggggtttaaaaactgagctaagggaaaaaacttgtgtttccaaaattaaataggttggaaaaaattcccttttcaaacttgttcatggatatgtagtgc

SEQ ID NO: 31052 - DNA, 384 bp, Zea mays
  Clone ID: LIB3181-007-P1-M1-E7
gttgcaaataagaacaactaccattcagccagctatctgctgcctacccccagcaatttcttccattcaaccaactgacagcattgaactctcctgcttatttacagcagcaacaactactaccattcagccagctagctggtgtgagccctgctaccttcttgacacaaccacagttgttgccgttctacctgcacgctgcgcctaacgctggcaccctcttacaactgcaacaattgctgccattcaaccaacttgctttgacaaacccagcagcattctaccaacaacccatcattggtggtgccctcttttagatttattatgagttatagttcaataataaagttttttgtctgatgtttgtggcttcccagaaataag

SEQ ID NO: 31053 - DNA, 377 bp, Zea mays
  Clone ID: LIB3181-007-P1-M1-E8
ccggtttccccccaaacccgtccgagaggcagtcatcccgccgcgatgagggccaaggtgagcttccctcccgtcttacgaatctcgttgcgccgctatctgtttcgtctcgtagtggcctcgcgccgtgcggttctctgtgatgagcaaacagatgacgagtccgatcgaatccattccattacaccatgtggacaaccgaggcatttgtctgagagaacccaccgttcttgctgtattgatgctagtatttttttttggtgtttcctagtgtcgttcggttgtttgttttgcctttatttatttatttattttttggttggcatgatgaggaaagaaatacaagtctgatctgctagatgagaaattcctcctac

SEQ ID NO: 31054 - DNA, 386 bp, Zea mays
  Clone ID: LIB3181-007-P1-M1-F1
tcgtgatgaccactgtccatgccatcactgctacccagaagactgttgatgggccctcgtctaaggactggaggggtggaagggctgctagtttcaacatcattcccagcagcactggagctgctaaggctgttggcaaagtgctttctgtccttaacggaaagttgactggaatgtctttccgtgtcccaaccgtcgatgtttctgttgttgatttgactgttaggcttgagaagtcagcaacctatgatgagatcaaggctggggtcaaggccgaggcaaaaagtagccttaagggcattctgggttacgttgaggaggaccttgtttccaccgatttccaaggtgacagcaggtctagcatttttgatgcttaggctggcatt

SEQ ID NO: 31055 - DNA, 65 bp, Zea mays
  Clone ID: LIB3181-007-P1-M1-F10
gtatatccctttttaaccagtgggcatactaaatgataagtgggacacgctctgtcttggcaaaa

SEQ ID NO: 31056 - DNA, 384 bp, Zea mays
  Clone ID: LIB3181-007-P1-M1-F11
gtcagctcatttgctccacattgaatgggtgtaacagaacttttggagatgtttgtttttagccctgtagaatgaccaaagatgtctaaaatgccgatcattgttgagatatcctgatgagagggccgcatgaacaaaacaacatcatcagcatagaaggagatacaatgtttcgcatgttgatttgcaatcggctgcaggatatgttccctgaaagcataactgaccatagcattcaaagcctccatgacaagaataaacaacatgggggacaaaggatcgccttgccgaagaccccgatgatgcagaatgtattccccaggctcaccattaacaaggatccgtgtagaggaagtgcaaaacagtagactaataaggttgcac

SEQ ID NO: 31057 - DNA, 399 bp, Zea mays
  Clone ID: LIB3181-007-P1-M1-F12
gcggccgcttccctcgtcgctgcctctgtccctgctgctgctcctccttctgtgctgcttcggcacctcgtggggatggagcacgtcccggggaggagccgccagggagtgcggcttcgatggcaagctggaggccctggagccgcgccacaaggtgcagtctgaggccggctccgtccagtacttcagccggttcaacgaagccgaccgggagctcacctgcgccggcatctttgtcgtccgcgtcagtgtcgacgccatgggcctcctgctgcctcgatactccaacgtccattcgcttgtctacatcgtccaagggagagggatcattgggttcttgtttccgggatgccaagaggagacccagcagcagcagtattgatacggatatggatatgg

SEQ ID NO: 31058 - DNA, 371 bp, Zea mays
  Clone ID: LIB3181-007-P1-M1-F3
agaacatgtgatattgataccggagcagcgtatatgattatgatgatgatgttatataccacacatctgtttggctgaggtatggacactttttgggtcatcaggttgcatgctgggaaagcacagatgtgaaaccgccgcgggtaaggtggtctccaggatccttgatgttcgtgacaggaacgtccgaactgtcctgctgggtgccggatttgtccaagctggagtccttcaccatcagccacaccaacaccaggtccagctcgtccctgtaggcttggaccgatttgcatgccgtgtggctggttgacgcgactccatcaagagcaggaggaacaagaaagcatagcggagcatcttgtacgaatgag

SEQ ID NO: 31059 - DNA, 379 bp, Zea mays
  Clone ID: LIB3181-007-P1-M1-F4
tcgaacacaccaagcgaagctcactagcaacgacctaacaacaatggctaccaagatattagccctccttgcgcttcttgccctttttgtgagcgcaacaaatgcgttcattattccacaatgctcacttgctcctagtgccattattccacagttcctcccaccagttacttcaatgggcttcgaacacctagctgtgcaagcctacatgctacaacaagcgcttgcggcgagcgtcttacaacaaccaattgaccaattgcaacaacaatccttggcacatctaaccatacaaaccatcgcaacgcaacagcaacaacagttcctaccagcactgagccaactagctgtggtgaaccctatcgcctacttgcaatag

SEQ ID NO: 31060 - DNA, 383 bp, Zea mays
  Clone ID: LIB3181-007-P1-M1-F7
attgagaccaacaagcaacatagaaagtggaatccagtagcaacaatagagcaacaatggagaccaagatattttccctccttatgctccttgctctttctacatgtgttgctaacgcgacaattttccctcaatgctcacaagctcctatagcttccctttttcccccataccttccatcaattatagcttcagtatgtgaaaacccagctcttcaaccatataggcttcaacaagcaatcgcagcaagcaacatacctttatcgcccttgttgtgtcaacaatcgccagccctatctttggtgcagtcattggtacaaaccatcagggcacaacagctgcagcaactcgtgctacctgtgatcaaccaagtagctctggca

SEQ ID NO: 31061 - DNA, 301 bp, Zea mays
  Clone ID: LIB3181-007-P1-M1-F9
tcgcccacgcgtccgcgttgcagttgtatcgtgatcatggtcctgggagttgttgcatgcatccggggcgcgctttttaggtcaggcgtcgtgtgcgatgtttgtggggtcaggctggcatgtcatgccgtgcgtgaccctgattgcgagccggcaagcaagcaagaaaaaaaaactaaagccgtgtgggaaaatggaggaggcaggcgtacaagctacgctctcccgcccactgttgcttttataatttatcatcatcttcattccgatcggtgattaatcgaaaagtatattgtaatgt

SEQ ID NO: 31062 - DNA, 384 bp, Zea mays
  Clone ID: LIB3181-007-P1-M1-G1
tcgagaacatgtgatattgataccgaagcagcgtatattattatgatgatgatgttatataccacacatctgtttggctgaggtatggacactttttgggtcatcaggttgcatgctgggaaagcacagatgtgaaaccgccgcgggtaaggtggtctccaggatccttgatgttcgtgacaggaacgtcggaactgtcctgctgggtgccggatttgtccaagctggagtccttcaccatcagccacaccaacaccaggtccagctcgtccctgtaggcttggaccgatttgcatgccgtgtgggtggttgacgcgacttcatcaagagcaggaggaacaagaaagcatagcggagcattttgtaccaatgagttgtgatggt

SEQ ID NO: 31063 - DNA, 388 bp, Zea mays
  Clone ID: LIB3181-007-P1-M1-G10
tcggaccaacttgcaacatagaaagcacaatagtgtaccaacaatggcagccaaaatattttgcttccttatgctccttggtctttctgcaagtgctgctaccgcaaccattttcccacaatgctcacaagctcctatagctttctttcttcccccatacctctcaccagcggtgtcttcagtatgtgaaaacccaattcttcaaccctacaggatccaacaggcaatcgcagcaggcatcttacctttatcacccttgttccttcaacaaccgtcagccctattacagcagttacctttggtgcatttgttggcacaaaacatcaaggcacaacaactacaacaacttgtgctaggaaaccttgctgactactctcagcaacagcag

SEQ ID NO: 31064 - DNA, 383 bp, Zea mays
  Clone ID: LIB3181-007-P1-M1-G11
gttgccgtacgtgcctaagctagcttcgtcgtctcgttgcacgtacgtagtagctagacagccgaatcggctctctagctagctcctcccttccgatcgatatcatcgccatgtcggggatctcgctggcggtggcgccaaggtccgacccggaccacgggtcggagcggcagccgacggcgatgctgggcggcgtgatgggctcgctccgcgtcatcgagctgcagctggtggccttcatcatggtgttctcggcgtcgggcctcgtcccgctcatcgacctcgtgttccccgtcgccaccaccgtctaccttctcgccatctcccgcctcgccttcccgccgctgcacgccaccaagtcgtccaagcctgatgacgccgcc

SEQ ID NO: 31065 - DNA, 393 bp, Zea mays
  Clone ID: LIB3181-007-P1-M1-G12
gcgagccgatctaggagtgattctcctgatgggtcacccaaacgcataagacgtggacggggttttactcaacgctattcatttgcaagacaatatcgatcaccttccgctgatcgcttgcatcgttatggcggaagaaatgaccgtgacagatacatgggttaccggggtttccgccaccgatcacctcgacggtataggagcccctctagaggcagagtgtcatcgccaaggtacaggaggaggagccgaagcgcatcacgcagtcctgtccacagaggaaggagaggtgggtacaacaagagtcctgtacggagccgttcaccccccgccaggaaaaggtcacctagcgatcgtgcacggtcagtttccaggagccacctttctaggtca

SEQ ID NO: 31066 - DNA, 404 bp, Zea mays
  Clone ID: LIB3181-007-P1-M1-G3
tcgtaaaaaaaaaaaaaaaaaaaggaaaaaaaaaaaaataaaaaaaaaaaaaaaaaaaaaaaaaaaaaaaaaaaaaaaaaaaaataaaaaaaaaaaaaaaattaaaaatttttgaataaaaaaaaataaaaaataaaataaattaaaactggttaaaataaaatgtaaaaaatttttaaaaaaaaataaaataaaaaaagggggggggctttttaaagaaaaaaatttttcttacctttttttgtaaaaaaatttttttttttttggggacaaaaaaataaattacgggcgcgggtttttaaaaactgggtttttggaaaaacggggggttcccaaatttaatttttttagaaaaaaatctttttttgcaagttgggtataaaaaaaaaagccccccccctttt

SEQ ID NO: 31067 - DNA, 276 bp, Zea mays
  Clone ID: LIB3181-007-P1-M1-G4
tcgcggaccaccacgcggatgggctcttgcgacccttttccgacccccttgctttcttcctccgccaccctggcgcgttcttcttctccctttgcgtttccatggctcgcgacgccaccgccacattcttgccagcgctcctgttctggcttgttgaccttcttccgctcctcgttttacttctttttgacgtccacgtactctctctcttgtactggatttacatgttcgccacggactgtttcaggcagtccttgcttagcatgaattattaat

SEQ ID NO: 31068 - DNA, 371 bp, Zea mays
  Clone ID: LIB3181-007-P1-M1-G5
gcggccgccctttttttttttttttttttttttgtttttttttttttttttttttttttttttttttttccaaataaaaaactttatttttgaactataccttataagaaatctaaaagggggcccccccaatgttggtttgttggttgaacactgttgggtttgtaaaaacaagttggttgaatggcatcaatttttgctatattaagagggtgccagcttttggcccaacttgctgttagaacggtaacaactgtggtagttttcaaaaatggtccatggtttacacctttttgttgttttaatggtataagttgttgctcttttaaataaactgggaattctctatgctttttgttgttttaatagaa

SEQ ID NO: 31069 - DNA, 251 bp, Zea mays
  Clone ID: LIB3181-007-P1-M1-H10
gaaaaagaaatgaccgggacagatacaagaacgaccggggggggaaaaaccgagcaccacgaaagtaaaggagcccgcaaagaggcagagtgtcaccagcaggggacaggaggaggaggcgaagcgcaacacgcagtcccgaccacagaggaaggagaggggggaacaacacgagccctgtacggagccgaacacccccgggcaggaaaagggcaaccagcgatggggcacggacagataccaggagccaa

SEQ ID NO: 31070 - DNA, 232 bp, Zea mays
  Clone ID: LIB3181-007-P1-M1-H12
tcggtcgcagcctttatattgttcagttcttagaaggtccaaaaaggcacgcagcgctctatatatatctcagctatacgtacgcgaccattgcgaacgcttatgttgcgtaagaatgtaggcaagaatagatggacgtgcggggtagcacaacacgcctaaactgagaaaacaggtccctaacataacccaatggaagatcaacacgtttgaccctggcttgaacgagggc

SEQ ID NO: 31071 - DNA, 373 bp, Zea mays
  Clone ID: LIB3181-007-P1-M1-H2
ttgtaggggagttttctagcacattcaagatggggcgctcgggactgcgagacaagctctacgctatagggacaattaaaggctacaaaatgtccaagtggaaacaacgcgagagactgtgaaatctttagatcgacggggttgacaccaatgttggacacatcgtggtacgatgagttgcgcatagagaacatatacacggttaagacgaatagcagaacgactcggtacaggtgcatctgaagtaagggcactctgtagcacggtaacttagaccgtggatcgtcgaagttcaagtctaaactaccgcctgagtacatggggcgcatagggagagtgcttatgtacttcagcaggatttaaaggtaagttt

SEQ ID NO: 31072 - DNA, 384 bp, Zea mays
  Clone ID: LIB3181-007-P1-M1-H5
tcgccccgtccccgttttccacttttgcctccgccccaattcggataacaaacccctccgcctcgtcgcgtctcctcccagccgagccgatccggtagagagagggagagggagggactgagggaggaggagctgggttccggtcccggccgcccggccggctgcgcgattcgattgcagctctcgtccccgggcggcgtccaggatggtgcggggcaagacgcagatgaagcggatagagaacccgaccagccgccaggtcaccttctccaagcgccgcaacggcctgctcaagaaggcgttcgagctctccgtcctctgcgacgccgaggtcgccctcgtcgtcttctccccgcgcggcaagctctacgaattcgccagcgg

SEQ ID NO: 31073 - DNA, 219 bp, Zea mays
  Clone ID: LIB3181-007-P1-M1-H7
ggcgcgctcgagaacagcgcgaggccgcaggccgcgatcagcaggccggcggcgatcgggccgcgaatgccgaagcgcatcacgatccgcgccgacagcccgagcgagaacgcggccatgatcaggttcgccggcaggaacgcgaggccgacctgcagcggcccgtagccgagcacgcgctgcatgtagagcgcggacaggaagaaccacgcgaacatc

SEQ ID NO: 31074 - DNA, 442 bp, Zea mays
  Clone ID: LIB3181-008-P1-K2-A10
ctcctccttcccgcacgtcagacgtcttctttcacaatctagcgcgtacgtacgtgccgggccaaaccatgtccgcgagagctcttctcctgacgaccgcgacgctgctcctgctcgtcgccgctgcgcgtgcggggcagccgctcgccggcgggtggagcccgatcaggaacgtcagcgacccgcacatccaggagctcggcggctgggcggtgacggagcacgtcaggcgggccaacgacgggctgcggttcggcgaggtgacgggcggcgaggagcaggtggtgtccgggatgaactacaagctcgttctcgacgccacggacgccgacggcaaggtcgcggcgtacggggccttcgtgtacgagcagtcgtggaccaacacccgcgagctcgtgttcttcgcgccggccagctgacgaccagctggacgtaattaatc

SEQ ID NO: 31075 - DNA, 426 bp, Zea mays
  Clone ID: LIB3181-008-P1-K2-A12
agacgcctccaatccgggctcccagcgtctcggaaaagaggagcagcacggcacggcggcgatggcgaggaacgctccaataatatgctaacccgttctacccagtccaattagcagcctcccaaggagaaggagatccaatcctgcgggcgggcgtccccgtatcccatccatcgatccgaatctcggaatctgcaggaccctgcggcgcggcttcttcgtggagaagaggttgctgccgaagccaccgccaggtagccatgtcgtcctccgtgctgagggctgcggccgacagggccattcgcaggcaggccctcacgctgacgaacgccgcggtgtccaggatccggcagcttctcaacctaaggcaaccgccatacctgctgctgggtgtcaaagcgcgaggttgcaacggtcttttctaca

SEQ ID NO: 31076 - DNA, 346 bp, Zea mays
  Clone ID: LIB3181-008-P1-K2-A3
gtggttctccgtcgtgtggctgcgatctcaattggagtttggagggaggaagaaggaaggagtaagggaagaacctaaggtggtggacttccggatcgtacttagggatttgcccgaacttccggtaaaggtacttgatacatgttgggaatgaggggagtagcagcacgtccacttacactctcacaataacgctgcccaggcgcagccatgatttaattagaaacttattgtcaaaggaagtttgttttttatatagtcgtgcacactgattaattcagttcaggtcgtacgtttatcttcccttgctagccgattaataatacttagtatgtttttggtcatg

SEQ ID NO: 31077 - DNA, 202 bp, Zea mays
  Clone ID: LIB3181-008-P1-K2-A4
ggcaaacattgttgccttcttacaacaacaacaattgttgccatttagccaacatgctttgacgaatcctaccaccttattgcaaccgcccaccattggtggtgccatcttctagattttttatgatttatactgtaataataaagttctcatgctgatatgtgcgacctctcagtaataaagtattagagatctatatttt

SEQ ID NO: 31078 - DNA, 399 bp, Zea mays
  unsure at all n locations
  Clone ID: LIB3181-008-P1-K2-A5
gggccgacccacgcgnacgaacgaaccccgccgagtacatacaaccacattttttttaacaaaaaggacagaacaaagggggggggttgaaactaacttttgaactatccccacggcactaacagacatttactctaacaactttaaactctccatatacatgaggataaagacggtagtagcatcactttcacttacactatcacaaaaacccttatcattcgcacccatgatttaatccgaaacttattgtgaaatgaagtttcgttcttatatagtccatcacactgatttattcaattcacgtcttacatttatcttccgttgcttgccaattaataatactccagatgtattcgttcattaaaaaaaaaaaaaaaaattgctgccgttttatat

SEQ ID NO: 31079 - DNA, 451 bp, Zea mays
  Clone ID: LIB3181-008-P1-K2-A6
gttgattcagaggagagggcaagaatgctattttttttgcggaagaagaagcaggagaaagacggggtttgtaaaattgatgatgggatggcagacgagctagaaattaaagaagagactcctgaaagagttgaaatgaccattattgtcaaagccgatgtacaaggcagtgttcaagctgtcacagatgctttaagaagtcttaatagcgcacaggtgttcgtgaatgttgttcatgtaggtgttggcccaatcagtcagcatgacattgatctggcacaagcatgtggagcatatataggtgggttcaacattcgcagtccacctaatcctatcactcaagcagcagcaagagccaacataaaggttttgcttcacacggtcatctatcaccttattgaggagatgggaaaggccattgtggagaaggcaccgggaacttgtgaaaccc

SEQ ID NO: 31080 - DNA, 438 bp, Zea mays
  Clone ID: LIB3181-008-P1-K2-A7
ctcttctcagaagttggggagctcaagcgttattcaatgaactatgacaaggatgggagatccaaggggactgcggaagttgtttttgcaaggaaagtggatgctttggatgctatcaagagatacaatggtgttctacttgatgggaagccaatgaatttagagctcattggaaacaatgtcgaaccacctcccttgccaccattaatacacaatcgtcctttgcagaactataacgatatccacagcagtgtgcttcaatcccaaagaaatggtcagcgaagagcacctcaagtcaacggtcggggtggacgcagtagtcaaaccagcggtggccgcggacaggggagaggccgagggcaggaccggaaccgcacgcccatttctgcttcagatcttgacgccgaactcgacaagtaccatgcagcggcagcgaag

SEQ ID NO: 31081 - DNA, 350 bp, Zea mays
  unsure at all n locations
  Clone ID: LIB3181-008-P1-K2-B12
ngaaaacccagctcttcaaccctatatgcgctaacaagcaatcgcagcaagcaacatacctgtatcattcttgtttcaactatcgccagccctatctttggtgcagtcattggtacaaaccatcatgtcacagcatctgcagcaactcgtgctacctgtgatcaaccaagtagctctggctaacctttcttcctactttcagctacaacaatttctttcattcaactaactttctactattgtatcgtgtttttttattttttattaacaactttttaccttatcatttaatttttgctaactggtctgtcttgtctagtttatcaactattcttttctttcctatttaa

SEQ ID NO: 31082 - DNA, 440 bp, Zea mays
  Clone ID: LIB3181-008-P1-K2-B2
aaaaaaaaaaaaaaaaaaaaaaaaaaaaaatttaatttaaaaaaaaaaaaaaaaaaaaaaaaaaaggggaaaaataaaaaaaaatttaaaaaaaaaaaaaaaaaaaaggaaaaaaaaaaaaaaaaaaaaaaaaaaaaaaaaaaaaaaaaaaaaaaaggggggggcctttttaggggtccaaatttttcatcccggggattggaaggtaaaacttttttttttggggaacaaaaattaattcactgggccggggtttaaaaacggggggctgggaaaaaccgtgggtttacaaaattaaatggcttggaaaaaattccctttttaaaaggtggggaaaataaaaaaagggccggacccattttctttttaaaaaatttgcccaccttaattggaaattggacccccccttttaccggcattttaaaccgggggggggtggg

SEQ ID NO: 31083 - DNA, 453 bp, Zea mays
  Clone ID: LIB3181-008-P1-K2-B3
ccgcccgcccggccagggttttgccaccatggccgtcgccgcggccgccgcccggaggctcctctcccgccgcgcctcctcgaactcgctctccgcgttcctccgccgcggcgctgccccggagcagtcgctgctgcgcccggccgtcgtcgcggcggcctcccgcctcggcttcccgcgcgggatggcgcggcgacctggcggggacggctacggcgcgggccgggaccgcgcgcccacggagatggcgccgctgttccccggctgcgactacgagcactggctcatcgtgatggacaagcccggcggggagggcgccaccaagcagcagatgatcgactgctacatccagaccctcgccaaggtcctcggaagtgaggaggaggcgaagaagaagatctacaacgtctcgtgcgagcgctatttcgggttcgggtgcgagatcgatgagga

SEQ ID NO: 31084 - DNA, 412 bp, Zea mays
  Clone ID: LIB3181-008-P1-K2-B5
cgcggcggccgggggcgaagcccaggtttcgttggcggcgcggggaagaggagcgcgtggtgggtttttgacggttttatgcgctggggggaggccttattcctgctctacacgcccttctggctcacgctctgcctcggtgtcgtcgtcccattcaagctttacgagaggttcacggagctggagtacctgatccttggcttggtgtccaccgtcccggcggtcgccatccccctattcctcgtagggaaggcagatagggttagaaatttcaaagatcgatattgggtcaaggctaatatttggattataaacttttagctatgttgggaactacttctggacacattacttttttacagttcttggcgccgtatatacttttccattatggaggatgaataatggtccc

SEQ ID NO: 31085 - DNA, 445 bp, Zea mays
  Clone ID: LIB3181-008-P1-K2-B8
caactagttgctggtggtggtggtatcaagtctgtgaaagtgacctatgcatctgcgcgggcccctgatgatcttgacacgagacttctccgtgcaatgatcaccaagggattgattgaaccaatctccagcgtttttgtcaatctggtaaatgccgacttcaccgcaaagcagaggggagttcgcatcacggaggagaggatcctgctggacggctcacctgaaacacctatcgactacattcaagttcagattgccaatgtcgagtccaaatttcccagtgcgatatctgagactggagaaatcactgtggagggcagagtgaaggatggtgttcctcatctaacaaaggttggagcattccaagtggatgtgagcttggaaggaagcctcatcctctgcaggcaggttgatcaaccgggtatgattgggtcagttggaagcg

SEQ ID NO: 31086 - DNA, 473 bp, Zea mays
  Clone ID: LIB3181-008-P1-K2-C10
ggaaaacccggtccgacccacgcgtccgcctctccctccatccctcccgactccgtctttctacccttcccccctccgccgaggcgaccggccctgtcaatccgagactcccacgcaaaccctagccagctagctagccacaccggctgggtccaatggcggaggacggctgcgacagggaccagcagcagcagcagccggcggccgccgcggcgtcaggtggcgccggggtcgaggggcgcagcagggagagcgtcaagctcttcgtggggcaggtgcccaaacagatgtcggaggccgagctggtcgccatgttccgcggcgtcgccctcgtcgacgaggtcacggtcatccgcgacagggccaccagggtctcgcgaggctgctgcttcctgatatgtccatcaagggaggaggctgacaaggctgtgactgcataccacaacaagcgcacactacctggggcctcaagt

SEQ ID NO: 31087 - DNA, 221 bp, Zea mays
  Clone ID: LIB3181-008-P1-K2-C12
aaaaaaaaaaaaaaaaaaaaaaaaaaatttataataaaaaaaaaaaaaaaaaaaaaaaagggggggatatattaaaaaaaattttaaaaaaaaaaaaaaaaaaaaattaaaaaaaaaaaaaaaaagggggcgcccctttaagggttccaatttttcctccccgtccttttcacctaatatttttttttatgggtcccccaaattaaatttcccgtcccgct

SEQ ID NO: 31088 - DNA, 440 bp, Zea mays
  unsure at all n locations
  Clone ID: LIB3181-008-P1-K2-C2
ggaggaagaacaagggcgggctggagtcggagctggagcgccactacgacgacctgcagcgggagatgatgctcatggccgccgatcggccgcacaagcaactgcaacagcatcgaagtcacgggcaccgccccgatctgctccagaactgcgacctgcccccaccggccaagctcttcggccccgtacccaccctgcagaggctggagaccgccgctgccaaggaccacaaggccgacgacggcctgctgcgggcgctgcgcctgtcgcagtcgcgcgcgcgggaggcggaggacaagctggcggccgcgggcgccaccaacgtcgacctcgcggcgctgctcgtgcgggactccgtcgcgctcttcgcccaccgncgctgggtcatgatgctggaggccgagaattccctgcttcgaggaccacgacgagatgcggat

SEQ ID NO: 31089 - DNA, 454 bp, Zea mays
  Clone ID: LIB3181-008-P1-K2-C3
attgagaccaactagcaacatagaaagcacaatagtgtaccaacaatggcagccaaaatattttgcctccttatgctccttggtctttctgcaagtgctgctacggcgaccattttcccgcaatgctcgcaagctcctatagcttcccttcttcccccgtacctctcaccagcggtgtcttcggtatgtgaaaacccaattcttcaaccctacaggatccaacaggcaatcgcagctggcatcttacctttatcacccttgttcctccaacaatcatcagccctattacaacagttacctttggtgcatttattggcacaaaacatcagggcacaacaactacaacaacttgtgctagcaaaccttgctgcctactctcagcaacagcagtttcttccattcaaccaactaggttcattgaactctgcttcttatttgcaacaacaacaactac

SEQ ID NO: 31090 - DNA, 297 bp, Zea mays
  Clone ID: LIB3181-008-P1-K2-C5
atcagacaaggtgctacaaaaagatttgccgctcctctagtaactaggagcacactagaagttgtcataccaaatagtgctgttgcaagcctcaccatgagagctggtagcaagcttgctcaaataagcgagatctctggtgctactgtaacgctagctgaggacagacctgacatcttagagaaagttgttcgaatatctggtacccctgagcaagctaacaaaactgaaaatttgctgcaaggatttattctaagcatccccaaatgacattccttcaagctagttgaagacact

SEQ ID NO: 31091 - DNA, 312 bp, Zea mays
  Clone ID: LIB3181-008-P1-K2-C6
tcacaaaaacccacaaaggggggatattaaaacttttttcccccccacacccccaaaacagctcaacaccatctccccaagctcacaagccccataactactttcttccacaacctctcaccagcggtgctaccgatgtcaaaacccaatactcaaccctacaggatccaacacgcaatcgcagctggcatctcacccttatcacccttgcacctccaacaatcatcaaccctattacagcaggtaccctaggagcatttaaagtcacaaaacatcatctcacaacaactacaacaacctgggctaacaaac

SEQ ID NO: 31092 - DNA, 215 bp, Zea mays
  unsure at all n locations
  Clone ID: LIB3181-008-P1-K2-C7
caagtncaacccaatggccatgacgatgccacccatgttcttacagcaacccttccggcggtgctgcattctagatagaaatatttgtgtcgcaccgaataatgagttgacatgccatcgcgtgtgactcattattaacaataaaacatgtttcctcttattatctttcaaaaaaaaaaaaaccaaaatataaaataaaaggggggggggagggg

SEQ ID NO: 31093 - DNA, 448 bp, Zea mays
  Clone ID: LIB3181-008-P1-K2-C9
agaccaactagcaacatagaaagcacttttgtttaccaacaatggcagccaaaatatggggcgcttcttatgctccttggtctttctgcaagtgctgctacggcgaccattttcccgcaatgctcgcaagctcctatagcttcccttcttcccccgtacctctcaccagcggtgtcttcggtatgtgaaaacccaattcttcaaccctacaggatccaacaggcaatcgcagctggcatcttacctttatcacccttgttcctccaacaatcatcagccctattacaacagttaccttgggtgcatttattggcacaaaacatcagggcacaacaactacaacaacttgtgctagcaaaccttgctgcctactctcagcaacagcagtttttttcattcaaccaactaggttcattgaactctgcttcttatttgcaacaacaacaac

SEQ ID NO: 31094 - DNA, 439 bp, Zea mays
  unsure at all n locations
  Clone ID: LIB3181-008-P1-K2-D1
cccgtccgaaaaaaagtggaaaataanannaaaaaaanntcgtagaggaggttctgattgggggcagttgggctgagacccgagccggcgcccnnttccggcgctcgactaagctctgggaccccctaccttccgctncggcgggcgatgtgggcaatnctcgcagtgcttcnngccggcgtcccgccctccanngtctcccgnncttcgtcaatggcccctcgaggggggccttcctnncgaagcangnngagcttggaccggccnnntccgcgagccctattcnngcctcccttcgcangcngcangnntcgcggaccccggcggcccgcttcttagagtggatccannagcttaccgtacccgcgttgcattgcgacngnntcatagctnnncttctattagtggtcgacgctgaaattcaaaattcaactggcnc

SEQ ID NO: 31095 - DNA, 224 bp, Zea mays
  Clone ID: LIB3181-008-P1-K2-D10
tctctctctattgtgatattgtcgcccccccttttgccgcattaatagcgcctcgtgtgtgggttttccacaccgtgttaccgtcacatttgccaacccctcataacccccgctcctttccgttatttttcccttccttttctcccccactttcgccccgtttcccccacaaactactaaatataggggcctttcctttattggatccctaattaattgcttta

SEQ ID NO: 31096 - DNA, 288 bp, Zea mays
  Clone ID: LIB3181-008-P1-K2-D12
atcctctcccaccttactcaagctagtgcgatgcatagcaatggggttcgcccggaagagtggagttgcagcagtagggttttggtggctcctcccgctcgccggcgtgctggtgcctttggcggcagcatattgcctgcacgccgctgcttttctcccctttttcttcatctagggctcgctttttatcatcctcgccttgattgttgcattgtctttatacttttccttacctgatttctaacattcttactcggtttttcttgtttcttgatttgccttatcttt

SEQ ID NO: 31097 - DNA, 443 bp, Zea mays
  unsure at all n locations
  Clone ID: LIB3181-008-P1-K2-D2
ggtgcgcgtgcgcatccgcaactacgatcctgcgaagctggacgcattctggacgtcgtaccggcagaacgtgacgtacaacctcacgcaccggaactgctcgagcaccgtgtcgaacgcgctcgaagccgcactcgacggcgcggtgtggcgcctgaagggcgcgcgcgccggatggggcgcgttcgtgcgcttgttggtcacgcccgagctgtgggtcgccgcgcagatccgcaagcgcgcggtgacgatggcatggacgcccggtctcacgctcgactatgcgcgtgcgctcagcatgctcgccgatccgcggccgttcgcgtggtggaaggtcgcgcgctcggcggtgaaggcgatcatggcgtcgcgccgcgcgtggcgcgagcaggacagtgcggcgctgtcgtccggcggatcggaagccgcantcgatgaagtga

SEQ ID NO: 31098 - DNA, 71 bp, Zea mays
  Clone ID: LIB3181-008-P1-K2-D5
aaaaaacaacaaaaaaaaaaaaaactttttataaaaacaaaaaaaaaaaagggcgtggtttttaatttttt

SEQ ID NO: 31099 - DNA, 391 bp, Zea mays
  Clone ID: LIB3181-008-P1-K2-D6
cacgcgaacgatcccccctcccaggtgctgcccaggaaagtttttttcggcgatgacaacgcgcttcaagaagggccgtattaagcgcgttcacgtgtccgccgggcacggccgcattggcaagcacaggaagcacccgggaggtcgcggtaacgccggtggcatgcaccaccaccgtatcctcttcgacaagtaccatccgggctacttcggcaaggttggcatgcgttacttccataagctccgcaacaagttctactgccccgcggtcaacatcgagcgcctctggtcgatggtgcccgccgacaaggcggcggaggccggcggcgacaaggccccgcagatcgacgtcacgcaattcggcttacttaaggtgctcgggaagggggtg

SEQ ID NO: 31100 - DNA, 434 bp, Zea mays
  Clone ID: LIB3181-008-P1-K2-E10
caaccaattgcccaattgcaacaacaatccttggcacatctaaacctacaaaccatcgcagcgcaacagcaacaacagtttctgccatcactgagccacctagccgtggtgaaccctgtcgcctacttgcaacagcagctacttgcatccaacccacttgctctggcgaacgtagctgcataccagcaacaacaacgtctgcaacagtttatgccagcgctcagtcaactagccatggtgaaccctgtcgcctacctacaacagcaacaattgctttcatctagcccgctcgctgtgggcaatgcacctacgtacctacaacaacagttgctgcaacagattgtaccagctcttactcagctagctggggcaaaccctactgcctacttgcaacaagtgctttcattcaaccaactggctgtgtcgaactctgc

SEQ ID NO: 31101 - DNA, 456 bp, Zea mays
  Clone ID: LIB3181-008-P1-K2-E3
aaaaaaaaaaaaaaaaaaaaaaaaaaaaaattttttttttttaaaaaaaaaaaaaaaaaaaagggggggtaaattaaaaaagttttttagaaaaaaaaaaatgggggcaaaaataaaagaaattaaaattaaaattctttttttttaaataaaaaaaaaataggggggggcgttttaaaggttcccaattttctccccggttttttccccgttattttttttttttttggggcccaaaaaaaatttacctgggggggggtttaaacattttgggggggggaaaaacctgggggacccccaattaattgcttttccaaaaaatccttttttcccctgggggggaaaaagaaaaaggcccctcccgttctttttttccaaaagggggggaccttttttgggaaaagggcccccccccttttcggggcttaatagccggggggtttttgggttcccccc

SEQ ID NO: 31102 - DNA, 521 bp, Zea mays
  unsure at all n locations
  Clone ID: LIB3181-008-P1-K2-E4
cggaatncccggggncggacccacgccgtcncnngagatattanacacngagaggcgtcantnncagaaaatcaatgatactcaanannatagttcgctttcaacacattttggatgcagacgatctttgtnncagaaaatgtgaggggaccacgatcctacatagaagttgttttatgaccaacatgatgcnngaagtcattggcctccatgtgggcttgcttaaaggacnncacttaatttatgaagaggaaacattgtggaaacatcatgnggtttgatgttgcatggtatttccacttctgctaacttgattggtaacattttgacaaggcttgtcttgtttcctgaattgcaagatcagctacatgaggagattgtttcagtctgcaataaatcatctaaagtggaggttgatgatctgcttaggatgcaagttctacttgctactgtatgtgaatctgctcgccttttgcctgctggacctcttctgcaacgatgttctttgaaacatgatttga

SEQ ID NO: 31103 - DNA, 151 bp, Zea mays
  Clone ID: LIB3181-008-P1-K2-E8
aaaaaaaaaaaaaaaaaaaaaaaaaaaaaaaaaaaaaaaaaaaaaaaaaaaaataaaaaaaaaaatgaatataaaaataaaaaaaaaaaaaaaaaaaaaaaaaaaagaaaaaaaaaaaaaaaaaaaaaaataaaaaaaaaaagataataat

SEQ ID NO: 31104 - DNA, 150 bp, Zea mays
  Clone ID: LIB3181-008-P1-K2-E9
gttgtattgtagagatgggcacgccctgctgttatcgctgaagagatgggagggcgagcgatactccggtctagttgctggtattcttggtgtatttcttactataatggcccaatcttaaggttatatgagcagcaatttttatgaacc

SEQ ID NO: 31105 - DNA, 317 bp, Zea mays
  unsure at all n locations
  Clone ID: LIB3181-008-P1-K2-F10
gaaaaangggccgaccgcnacaagacagcacccacgccagaggatccacgctttttttcccaaccaatcgacgccacaccgggcggtgtatttcaaacactttttctccccccctacgacactaactaccactccggccaccaaaatgcgctcccctcaccacctactcacagagacacactcctccatccagaaagttacagcccggatactctccatcaagaaagacagcgcccccaattcagaactccctgagctcgtcacttaaatatttttgcacctcgacacgctacaccaagtgaacaaatagatactta

SEQ ID NO: 31106 - DNA, 449 bp, Zea mays
  Clone ID: LIB3181-008-P1-K2-F2
aaccgcagcaaatcttctccggcaccggcagcgcccaaatccggcaatccgctgctccgaatggactcaggttacaatccccggacggtggaggaggtgttccgggacttcaagggccgtcgtgccgggataatccgcgcgctcaccactgatgcggaggatttcttcaagcaatgcgacccggaaaaagaaaacttgtgcctgtatgggtttcctaatgagagctgggaagtaaatttgcctgctgaagaggtgccacctgacctcccagaaccagcattaggcataaactttgcaagagatggaatgcaggaaaaagagtggttgtccatggttgctgcacacagtgatgcatggttactttctgttgcattttacttcggtgctcgattcggtttcaataaaaatgacaggaagcgcctctacagtttgattgatgatcttcccat

SEQ ID NO: 31107 - DNA, 498 bp, Zea mays
  unsure at all n locations
  Clone ID: LIB3181-008-P1-K2-F4
cggaannacccggggtcggacccacgccgnntccgccacttcatcaaccaagggccgtcgtctcttccccacgctcggcccgaaccggatgggcggcggcgcccgactggcggatgccatgtgacgtcgacgccgcccggctaggacnngctgactacctctccggcccaccaagttgcgctcccctcacgaacctcctcgcagagacacgcgcctccatcgagaaagtcgcagcccggatactcgccatcaagaaagacggcgcccccaagtcggagctccgcgagctcgtcactcagatgtctctgcacctcgtcacgctacgccaagtgaacagagagatactgatggaggaggacaaggtcaaggcggagacggaggccgcgaaagcgccggtggactccacgacgctgcagctgcataacctgttgtacgagaagaaccactacgtgaaggccataagagcgtgtcttgactttcagacgaagtatccgggga

SEQ ID NO: 31108 - DNA, 460 bp, Zea mays
  unsure at all n locations
  Clone ID: LIB3181-008-P1-K2-F6
gacccacgcgnncgcaactagcaacatagaaagcacaatagtgtttcttttatggcagccaaaatattttgcttccttatgctccttggtctttctttaagtgttgctaccgcaaccattttcccacaatgctcacaagctcctatagcttcccttcttcccccatacctctcaccagcggtgtcttcaatgtgtgaaaacccaattgttcaaccctacaggatccaacaggcaatcgcaacaggcatcttaccattatcacccttgttcctccaacaaccggcagccctattacagcagttacctttggtccatttggtggcacaaaacatcagggcacaacaactacaacaacttgtgctagcaaaccttgctgcatactctcagcaacatcagtttcttccattcaaccaactggctgcattgaactctgctgcttatttgcaacaacaattaccat

SEQ ID NO: 31109 - DNA, 438 bp, Zea mays
  Clone ID: LIB3181-008-P1-K2-F8
tagcccgctcgctgttgtaggtaggcggcagtgttcaccatggctagttgactgagcgctggcagaaactgttgcagctgttgttgtggctggtttgcaactacgtttgccagagcaagtgggtttgatgcaagcaactgctgttgcaagtaggcggcagggttcaccatggctaggtggctcagtgctggtaggaattgttgttgctgttgcgttgcgatggtttgtattgttagatgtgccaaggattgttgtggcaacttccagcttgcgcatcgctgggtcaacaacccacatggccggcgtagccctttgaatcttgttcgcagccgtgattttatcactgtgggtgaaacgtaatcacatacttactgtaatctactatggctgaagatgtgtgccccctgacttatgccttgtgttgcttgtgcttgactt

SEQ ID NO: 31110 - DNA, 442 bp, Zea mays
  Clone ID: LIB3181-008-P1-K2-G11
atttattggcacaaaacatcagggcacaacaactacaacaacttgtgctagcaaaccttgctgcctactctcagcaacagcagtttcttccattcaaccaactagctgcattgaactctgcttcttatttgcaacaacaacaactaccattcagccagctacctgctgcctacccccagcaatttcttccattcaaccaactggcagcattgaactctcctgcttatttacagcagcaacaactactaccattcagccagctagctggtgtgagccctgctaccttcttgatacaaccacagttgttgccgttctaccagcacgctgcgcctaacgctggcaccctcttacaactgcaacaattgctgccattcaaccaacttgctttgacaaacccagcagcgttctaccaacaacccatcattggtggtgccctctttta

SEQ ID NO: 31111 - DNA, 193 bp, Zea mays
  Clone ID: LIB3181-008-P1-K2-G12
gttgccttcttacaacaacaacaattgtttgttatttagccaacatgctttgacgaatccggccaccttattgcaaccgtccaccattggtggtgccatcttctagattttttatgatttatactgtaataataaagttctcatgctgatatgtgcgacctctcagtaataaagtattagagatctatatttt

SEQ ID NO: 31112 - DNA, 122 bp, Zea mays
  unsure at all n locations
  Clone ID: LIB3181-008-P1-K2-G2
cgctggcaccctctaacaactgcaacaattgttgttctncaaccaactcgctttgacaaacccggcagcatttctaccaacaacccatcattggtggngccctcttttagatttcttatgag

SEQ ID NO: 31113 - DNA, 439 bp, Zea mays
  Clone ID: LIB3181-008-P1-K2-G5
gaccagacccgcccggcctggttgaggacttttttatactggactggaggaggacggggtggcggctattggagagttctctcacgccatgacaggtccaccgccaaagccttgggagcgatctggaactgaaggaacttcaggtccagcacctttcaagcccccatctggtggaagcaccaatgatgttgttgaagcctgtggtaccgctaaacccagcgaaaatgttactgcgatggacgggaatgccgctcccaatgtaaatagcactatttcaaggcctatgccacaacggacttggcagcagacaggttatgtgaaacacctatggagggtatggtggatccaacatgtatagctcatatggtggattttgcaacacttattgttcctattgacctcgaaatagcatgtactctagttacggatgaagttatgg

SEQ ID NO: 31114 - DNA, 338 bp, Zea mays
  unsure at all n locations
  Clone ID: LIB3181-008-P1-K2-G7
aaaaaccgggcgggccgacgcgnccgacacttcatcaccaaggccgacaactttttttatgccggccgaacggatggcggcggggggggctgtttatgccatggacttcgacgcgccggctaggacgctgactacctttccggccaccaagttgcgctcccctcacgacctcctcgcagagacacgcgccttcatcgagaaagtcgcagcccggatactcgccatcaagaaagacggcgcccccaagtcggagctccgcgagcttgtcactcagatttctctgcaccttgtcacgctacgccaagtgaacagagagatactgatggaggaggacaagg

SEQ ID NO: 31115 - DNA, 213 bp, Zea mays
  Clone ID: LIB3181-008-P1-K2-H10
aaaacggccgcggccacaaacgcgacgtctaaaaacaattttttactccgcatcgacacaagcgtgcgtttttacctaatttaaccaccaccgcgattacaacgcaactggaaaacccgcgttaccaacttaatccctgcacacatccccttcccacctgctaaacgaaaggcccgaccacgccctcaacaatgccacctaatgcaatggacc

SEQ ID NO: 31116 - DNA, 443 bp, Zea mays
  Clone ID: LIB3181-008-P1-K2-H4
tggaactctcccaggttgcccacaagagggatgctctccgaagctcactgtggagggttcgagggtgtttctttcgccgcggctggtagagatcatggtgcagcgcatgagggaaggacagatccctccgagccaaaaggtctactgtccgtatcccaggtgctcggccttgatgtccttgggggaagtgattcatccgatgcaggagtcctcatcaaggcacacggctgctgatgctgccacgttgaggaagtgcgtgaaatgcagaggctccttctgcctgagctgtaaagtcccatggcatgatggcatgcgttgctttgagtacaagatgtggtaccccctcgctcacccaggagatgccaagctgcagaacctggcaaggcagaggctgtggcgccaatgcgtgaaatgcaagcacatgatcgagcttgcggagggct

SEQ ID NO: 31117 - DNA, 341 bp, Zea mays
  Clone ID: LIB3181-008-P1-K2-H5
ttcccccgtacctctcaccagcggtgtcttcggtatgtgaaaacccaattcttcaaccctacaggatccaacaggcaatcgcagctggcatcttacctttatcacccttgttcctccaacaatcatcagccctattacagcagttacctttggtgcatttattggcacaaaacatcagggcacaacaactacaacaacttgtgctagcaaaccttgctgcctactctcaacaacagcagtttcttccattcaaccaactagctgcattgaactctcgttcttatttgcaacaacaacaactaccattcagccagctacctgttgcctacccctaagaaatt

SEQ ID NO: 31118 - DNA, 87 bp, Zea mays
  Clone ID: LIB3181-008-P1-K2-H8
aaaaaaaaaaaaaaaaaaaaaaatttgttttaaaaaaaaaaaaaaaaaagcgccggttttttctaaatatttttccccccaccccac

SEQ ID NO: 31119 - DNA, 247 bp, Zea mays
  Clone ID: LIB3181-008-P1-M1-A10
ttcgttcgctcctccttcccgcacgtcagacgtcggcacacacaatctagcgcgttcgtacgtcccaaaccaaaccatgtccgtgagagcttttttcctgacgaccgctacgctgctcctgttcgtctccgtttcacgtgcggggcatccgctcgccggcttggtggtgcccgatctggtacgtctttgacccgcacattctgtagctcggtggttggtcggtgacagagcacgtcatgctgtccat

SEQ ID NO: 31120 - DNA, 354 bp, Zea mays
  Clone ID: LIB3181-008-P1-M1-A12
agacgcctccaatccgggctcccagcgtctcggaaaagaggagcagcacggcacggcggcgatggcgaggaacgctccaataatatgctaacccgttctacccagtccaattagcagcctcccaaggagaaggagatccaatcctgcgggcgggcgtccccgtatcccatccatcgatccgaatctcggaatctgcaggaccctgcggcgcggcttcttcgtggagaagaggttgctgccgaagccaccgccaggtagccatgtcgtcctccgtgctgagggctgcggccgacagggccattcgcaggcaggccctcacgctgacgaacgccgcggtgtccaggatccggcagc

SEQ ID NO: 31121 - DNA, 346 bp, Zea mays; identical to SEQ ID NO: 31076
  Clone ID: LIB3181-008-P1-M1-A3

SEQ ID NO: 31122 - DNA, 202 bp, Zea mays; identical to SEQ ID NO: 31077
  Clone ID: LIB3181-008-P1-M1-A4

SEQ ID NO: 31123 - DNA, 399 bp, Zea mays
  Clone ID: LIB3181-008-P1-M1-A6
gttgtttcagaggatagggcacgaatgctaagtcatgggcggtagaagaagcttgagaaagacaggcttccaaaaattgatgaggggatggcagaagagctagaaattaaagaagagactcctgaaagagttgaaatgaccattattgtcaaagccgatgttcaaggcagtgttcaagctgtcacaaatgctttaagaagtcttaataacgcacaggtgttcgtgaaagttgttcatgtatgtgttggcccaatcagtcagcatgacattgatctggcacaagcatgtggagcatatatagtttgtgtcaacattcgcagttcacctattcctttcactcatgcagttgcaagagccaacatatatgttttgcttcacaagggtattctattacctttt

SEQ ID NO: 31124 - DNA, 338 bp, Zea mays
  Clone ID: LIB3181-008-P1-M1-A7
ctcttctcagaagttggggagctcaagcgttattcaatgaactatgacaaggatgggagatccaaggggactgcggaagttgtttttgcaaggaaagtggatgctttggatgctatcaagagatacaatggtgttctacttgatgggaagccaatgaatttagagctcattggaaacaatgtcgaaccacctcccttgccaccattaatacacaatcgtcctttgcagaactataacgatatccacagcagtgtgcttcaatcccaaagaaatggtcagcgaagagcacctcaagtcaacggtcggggtggacgcagtagtcaaaccagcggtggccg

SEQ ID NO: 31125 - DNA, 170 bp, Zea mays
  Clone ID: LIB3181-008-P1-M1-A9
ttatgcttttcgttctactcagagattgtggagcgcaatgctatcttaattggactatgacatgaatagttgatccaaggtctctgctgaagtagattattcaaggtaagaggtttctttccatgctgtcaatatacacaatggatcttattcttgatgtgtagccaatt

SEQ ID NO: 31126 - DNA, 330 bp, Zea mays
  Clone ID: LIB3181-008-P1-M1-B12
tcgtgaaaacccagctcttcaaccctataggctccaacaagcaatcgcagctagcaacatacctttatcacccttgtttcaacaatcgccagccctatctttgtagcagtcattggttcaaaccatcagggcacagcagctgcagcaactcgtgctacctgttatcaaccaattagctcttgcaaacctttctccctacttctatctacaacattttctttcattcaaccaactttctacattgaaccgttcttctttattgcagctacaactatttccatttattcctttagctactgtctacttttattaacaacatcttttttcatt

SEQ ID NO: 31127 - DNA, 411 bp, Zea mays
  Clone ID: LIB3181-008-P1-M1-B2
aaaaaaaaaaaaaaaaaaaaaaaaaaaaaaaaaaaaaaaaaaaaaaaaaaaaaaaaaaaaaaaaaaaaaaaaaaaaaaaaaaaaaaaaaaaaaaaaaaaaaaaaaaaaaaaaaaaaaaaaaaaaaaaaaaaaaaaaaaaaaaaaaaaaaaaaaaaaggggggggcctttttaggggtccaaatttttttttcctgtggttgcaagtatatattttttttatttgggcacaaaaataattttaatgggccggttttttaaaagggttggctgggaaaaacctgttgtttcccaaattaattgttttggaaaaaaatccctttttaacagtggggaaatattataaatgggccggtcccattcgcttttcaaaaaattttcccaccttttttggttattggcccccccctttt

SEQ ID NO: 31128 - DNA, 404 bp, Zea mays
  Clone ID: LIB3181-008-P1-M1-B3
tcgccgcccgcccggccagggttttgccaccatggccgccgccgcggccgccgcccggaggctcctctcccgccgcgcctcctcgaactcgctctccgcgttcctccgccgcggcgctgccccggagcagtcgctgctgcgcccggccgtcgtcgcggcggcctcccgcctcggcttcccgcgcgggatggcgcggcgacctggcggggacggctacggcgcgggccgggaccgcgcgcccacggagatggcgccgctgttccccggctgcgactacgagcactggctcatcgtgatggacaagcccggcggggagggcgccaccaagcagcagatgatcgactgctacatccagaccctcgccaaggtcctcggaagtgaggaggaggcgaagaagaagatct

SEQ ID NO: 31129 - DNA, 369 bp, Zea mays
  Clone ID: LIB3181-008-P1-M1-B8
caactagttgctggtggtggtggtatcaagtctgtgaaagtgacctatgcatctgcgcgggcccctgatgatcttgacacgagacttcttcgtgcaatgatcaccaagggattgattgaaccaatctccagcgtttttgtcaatctggtaaatgccgacttcaccgcaaagcacaggggtgttcgcatcacggaggagaggatcctgctggacggctcacctgaaacacctatcgactacatacaagttcagattgccaatgtctagtccaaatttcccagtgcgatttttgagactggagaaatcactttggagggcatattgaaagatggtgttcctcatttaacaaaggaaggtgctttccacgtg

SEQ ID NO: 31130 - DNA, 69 bp, Zea mays
  Clone ID: LIB3181-008-P1-M1-C10
aataccgactcactattagggaaaggctggtaccgcctgcaggttacctggtccggtaatttcccgggt

SEQ ID NO: 31131 - DNA, 61 bp, Zea mays
  Clone ID: LIB3181-008-P1-M1-C12
tcgattaaaaaaaaaaaaaaaaaaaaataaaaataaaataaaaataataaatattaattat

SEQ ID NO: 31132 - DNA, 397 bp, Zea mays
  unsure at all n locations
  Clone ID: LIB3181-008-P1-M1-C2
ggaggaagaacaagggcgggctggagtcggagctggagcgccactacgacgacctgcagcgggagatgatgctcatggccgccgatcggccgcacaagcaactgcaacagcatcgaagtcacgggcaccgccccgatctgctccagaactgcgacctgcccccaccggccaagctcttcggccccgtacccaccctgcagaggctggagaccgccgctgccaaggaccacaaggccgacgacggcctgctgcgggcgctgcgcctgtcgcagtcgcgcgcgcgggaggcggaggacaagctggcggccgcgggcgccaccaacgtcgacctcgcggcgctgctcgtgcgggactccgtcgcgctctccgtccaccgncgctgggtcatgatgctgga

SEQ ID NO: 31133 - DNA, 393 bp, Zea mays
  Clone ID: LIB3181-008-P1-M1-C3
tcgattgagaccaactagcaacatagaaagcacaatagtgtaccaacaatggcagccaaaatattttgcctccttatgctccttggtctttctgcaagtgctgctacggcgaccattttcccgcaatgctcgcaagctcctatagcttcccttcttcccccgtacctctcaccagcggtgtcttcggtatgtgaaaacccaattcttcaaccctacaggatccaacaggcaatcgcagctggcatcttacctttatcacccttgttcctccaacaatcatcagccctattacaacagttacctttggtgcatttattggcacaaaacattaaggcacaacaactacaacaacttgtgctagcaaaccttgctgcctactctcagcaacagcag

SEQ ID NO: 31134 - DNA, 240 bp, Zea mays
  Clone ID: LIB3181-008-P1-M1-D1
aaaaaaaggaaaataaaaaaaaaatcgtagagagttcgattggcagttgctgagcccgagcgcgccctccggcgccgacaagccgggaccccacctccgccggcggcgatgggcaactcgcaggcttcgccggcgtccgcctccagctcccgcttcgtcatggcctcgagggccttcccgaagcaggagctggacggcctccgcgagctattcgcctccctcgcagcgcagtcgcggacc

SEQ ID NO: 31135 - DNA, 182 bp, Zea mays
  Clone ID: LIB3181-008-P1-M1-D12
tcgatcctctcccaccttactcaagctagtgcgagcatagcaatggggttcgcccggaagagtggagttgcagcattaggggtttggtggctcctcctgctctcctgcgtgctgttgccttttgcggctgcatttggtcggcacgccgatgccggcttcgacatgtgctacatctatttgcc

SEQ ID NO: 31136 - DNA, 411 bp, Zea mays
  Clone ID: LIB3181-008-P1-M1-D2
ggtgcgcgtgcgcatccgcaactacgatcctgcgaagctggacgcattctggacgtcgtaccggcagaacgtgacgtacaacctcacgcaccggaactgctcgagcaccgtgtcgaacgcgctcgaagccgcactcgacggcgcggtgtggcgcctgaagggcgcgcgcgccggatggggcgcgttcgtgcgcttgttggtcacgcccgagctgtgggtcgccgcgcagatccgcaagcgcgcggtgacgatggcatggacgcccggtctcacgctcgactatgcgcgtgcgctcagcatgctcgccgatccgcggccgttcgcgtggtggaaggtcgcgcgctcggcggtgaaagcgatcatggcgtcgcgccgcgcgtggcgcgagcaggacagtgcggcgctgtcgtc

SEQ ID NO: 31137 - DNA, 62 bp, Zea mays
  Clone ID: LIB3181-008-P1-M1-D3
gattcattttagggaaagctgccccgcctgcatgtaccggttccggatattccctgggttga

SEQ ID NO: 31138 - DNA, 176 bp, Zea mays
  Clone ID: LIB3181-008-P1-M1-D6
tcgttttcccctaccaggtgctgcccaggtatgtcgtgtgctgctatgacaacgcgcttcatgaagtaccgtatgaagcgcggtctcgtgttcgacgggcacggtcgcatctgctagcacaggaagcacccgggaggtcgaggtatcgccgttggcttgcaccaccaccgtatttt

SEQ ID NO: 31139 - DNA, 326 bp, Zea mays
  Clone ID: LIB3181-008-P1-M1-E10
caaccaattgcccaattgcaacaacaatccttggcacatctaaacctacaaaccatcgcaacgcaacagcaacaacagtttctgccatcactgagccacctagccgtggtgaaccctgtcgcctacttgcaacagcagctacttgcatccaacccacttgctctggcgaacgtagctgcataccagcaacaacaacgtctgcaacagtttatgccagcgctcagtcaactagccatggtgaaccctgttgcctacctacaacagctacaattgctttcatctagcccgctcgctgtgggcaatgcacctacttacctacaacaaca

SEQ ID NO: 31140 - DNA, 254 bp, Zea mays
  Clone ID: LIB3181-008-P1-M1-E3
tatatataataaaaaaaaaaaaaaaaaaaaaagggggaatttataaaaaaaaaaaaaaaaaaaaataaaaaaaaaataaaaagtggtttaattatttataaatgggggtcttgtttatagtgttataatgttttaagtacttttatattaatgtttaatatttgggggggggcgtttttgggggcccctgtctttcgcccggctttgccactctttttattttttttttgtgggcccttaaaatattttcgggg

SEQ ID NO: 31141 - DNA, 394 bp, Zea mays
  Clone ID: LIB3181-008-P1-M1-E4
agatattaacagagagcgtcatcagaaaatcaagataccaaaatagttcgcttcaccattttgatcagagatcttgtcagaaaagtgaggggacagatccacatagaagtgttttagacaacatgatgcgaagtcattgcctccatggggctgctaaaggaccacttaatttagaagaggaaacatgtggaaacatcatgggtttgatgttgcatggtatttccacttctgctaacttgattggtaacattttgacaaggcttgtcttgtttcctgaattgcaagatcagctacatgaggagattgtttcagtctgcaataaatcatctaaagtggaggttgatgatctgcttaggatgcaagttctacttgctactgtatgtgaatctgctcg

SEQ ID NO: 31142 - DNA, 397 bp, Zea mays
  Clone ID: LIB3181-008-P1-M1-F2
aaccgcagcaaatcttctccggcaccggcagcgcccaaatccggcaatccgctgctccgaatggactcaggttacaatccccggacggtggaggaggtgttccgggacttcaagggccgtcgtgccgggataatccgcgcgctcaccactgatgcggaggatttcttcaagcaatgcgacccggaaaaagaaaacttgtgcctgtatgggtttcctaatgagagctgggaagtaaatttgcctgctgaagaggtgccacctgacctcccagaaccagcattaggcataaactttgcaagagatggaatgcaggaaaaagagtggttgtccatggttgctgcacacagtgatgcatggttactttctgttgcattttacttcggtgctcgattcggtt

SEQ ID NO: 31143 - DNA, 398 bp, Zea mays
  Clone ID: LIB3181-008-P1-M1-F4
ccacttcatcaccaaggccgtcgtctctccccacgccggccgaacggatggcggcggcgccgactgcggatgccatggacgtcgacgcgccggctaggacgctgactacctctccggccaccaagttgcgctcccctcacgacctcctcgcagagacacgcgcctccatcgagaaagtcgcagcccggatactcgccatcaagaaagacggcgcccccaagtcggagctccgcgagctcgtcactcagatgtctctgcacctcgtcacgctacgccaagtgaacagagagatactgatggaggaggacaaggtcaaggcggagacggaggccgcgaaagcgccggtggacttcacgacgctgcagctgcataacctgttgtacgagaagaaccactac

SEQ ID NO: 31144 - DNA, 52 bp, Zea mays
  Clone ID: LIB3181-008-P1-M1-F6
caacgagcaacacaaaaagcacaacagggccccaacaaaggcagccaaaaga

SEQ ID NO: 31145 - DNA, 385 bp, Zea mays
  Clone ID: LIB3181-008-P1-M1-F8
tcgtagcccgctcgctgttgtaggtgggcggcagggttcaccatggctagttgactgagcgctggcagaaactgttgcagctgttgttgtggctggtttgcaactacgtttgccagagcaagtgggtttgatgcaagcaactgctgttgcaagtaggcggctgggttcaccatggctaggtggctcagtgctggtaggaattgttgttgctgttgcgttgcgatggtttgtattgttagatgtgccatggattgttgtggcaactttcagcttgcgcatcgctgggtcaacatcccacatggccgtcgtagccctttgaatcttgttcgcagccgtgatttttatactgtgggtgaaacgtaatcacattcctactgtaatctac

SEQ ID NO: 31146 - DNA, 282 bp, Zea mays
  Clone ID: LIB3181-008-P1-M1-G10
aaagaaaaaaagcacacaaaatccagaaacaaaaaacaacaaacaaacccaacacaaaaacaaaaaaaaaaaaaaaaaaaaaaaaaaaaaaaaaaaaaaaaaaaaaaaaaaaaaaaaacaaaaaaaaaaaaaaaaacaaaaaaaaaaaaaaaaaaaaaaaaaaaaaaacaaaaaaaaaaaaaaacaaaaaaaaaaaaaaaacaaaaaaaaaaaaaaaacaaaaaaaaaaaaaacaaacaaaaacaaaaaaaaaaaaaaaagaaaaaaaaataaaaaaaacaa

SEQ ID NO: 31147 - DNA, 363 bp, Zea mays
  Clone ID: LIB3181-008-P1-M1-G11
atttattggcacaaaacatcagggcacaacaactacaacaacttgtgctagcaaaccttgctgcctactctcagcaacagcagtttcttccattcaaccaactagctgcattgaactctgcttcttatttgcaacaacaacaactaccattcagccagctacctgctgcctacccccagcaatttcttccattcaaccaactggcagcattgaactctcctgcttatttacagcagcaacaactactaccattcagccagctagctggtgtgagccctgctacctttttgatacaaccacagttgttgtcgttctaccagcacgctgcgcctaacgctggcacccttttacaactgcaacaat

SEQ ID NO: 31148 - DNA, 192 bp, Zea mays
  Clone ID: LIB3181-008-P1-M1-G12
gttgccttcttacaacaacaacaattgttgccatttagccaacatgctttgacgaatcctaccaccttattgcaaccgcccaccattggtggtgccatcttctagattttttatgatttatactgtaataataaagttctcatgctgatatgtgcgacctctcagttataaagtattagagatctatatttt

SEQ ID NO: 31149 - DNA, 132 bp, Zea mays
  Clone ID: LIB3181-008-P1-M1-G5
ttcggtctagacccatccggcctggttgaggttaaggaggagactagactggtggtggacggtattgcagacgagtggtgaggacgcgcacgctatttcttgtctcactatcatagccgtggtgagcgatct

SEQ ID NO: 31150 - DNA, 213 bp, Zea mays
  Clone ID: LIB3181-008-P1-M1-H4
tcgttttatctctcccaggttgcccacaagagggatgcgccacgaagctcagtgtggagggttcgagggtatttctttcgccgcggctggtagagatcatggtgcaacgcatgagggaaggacagatccctccgagccaaaaggtttactgtccgtatcccatgtgctcggccttgattgaccttgggggaagtgattcattcaatgcatgag

SEQ ID NO: 31151 - DNA, 428 bp, Zea mays
  Clone ID: LIB3181-009-P1-K2-A10
caacaagcaacatagaaagtggaatacagtatcaacaatagagcaacaatggcggccaagatattttccatccttatgctccttgctctttctgcatgtgttgctaacgcgaccatttttcctcaatactcacaagctcctatagctgcccttcttcccccataccttccatcaatgaccgcttcagtatgtgaaaaacccagcccttcaaccctacaggctccaacaagcaatcgcaacaagcaacttacctttatcacccctgttctttcaacattcgccagccctaattttggtgcagtcattgggacaaaaccattaaggcacaacagctgaagcaacttgtgctaccagtgaacagccaagtagctttggcaaaccttttttcctactcttagcaacaacaatttcttccattcaaccaactg

SEQ ID NO: 31152 - DNA, 405 bp, Zea mays
  Clone ID: LIB3181-009-P1-K2-A12
gttaaatagtcgattacttgaggaaattgaagaaagtaaagccttttttcaggtttatgaaggtgctgtttacatgcatcagggtgccaattacttggttgaggaacttgacttggcatcaaggacagccttctgtaggaaagccgatttgaaatattacacgaaaacacgagactacactgacatcaatgttctcggaggagaatttgcttatcttcctacaagtatatgtagaactaatcgggtgaagacaactgctcaagcaaatgactgcacggtgactactaaatggtttggtttttatcgcatatcaaaatctagcaatacaatatccgacagcttcgagcttaacctgcccccatacttctttacttcccaagctgtttgggtgcgaattccccactt

SEQ ID NO: 31153 - DNA, 190 bp, Zea mays
  Clone ID: LIB3181-009-P1-K2-A3
gccttcttacaacaacaacaattgctgccatttagccaacttgctttgacgaatcctaccaccttattacagcagcccaccattggtggtgccatcttctagatttttttatgctttatactgtaataataaagttctcatactgatatgtgcaacttctcagtaacaaaagattagagatctatatttt

SEQ ID NO: 31154 - DNA, 70 bp, Zea mays
  Clone ID: LIB3181-009-P1-K2-A5
aaaaaaaaaaaatataaaaaaaaaaaaaaatttttattaaaaaaaaaaaaaaaaaaaaaaaggggagggt

SEQ ID NO: 31155 - DNA, 446 bp, Zea mays
  Clone ID: LIB3181-009-P1-K2-A8
aagcaacatagaaagtggaatccatttgcatcaatagagcaacaatggcgaccaagataggttccctccttatgctccttgctctttctgcatgtgttgctaacgcgacaattttccctcaatgctcacaagctcctatagcttcccttcttcccccataccttccatcaatgatagcttcagtatgtgaaaacccagctcttcaaccctataggctccaacaagcaatcgcagcaagcaacatacctttatcacccttgtttcaacaatcgccagccctatcttttgtgcagtcattggtacaaaccatcatggcacagcagctgcagcaactcgtgctacctgtgatcaaccaagtagctctggcaaacctttctccctactcttagcaacaacaatttctttcattcaaccaactgtctacattgaaccgtgctggttatttg

SEQ ID NO: 31156 - DNA, 181 bp, Zea mays
  unsure at all n locations
  Clone ID: LIB3181-009-P1-K2-B12
ttcaacccaccccccgccggnaaacaacggagcgacagccaaaacccaggaacaacccaacaaaatcacccagcagcacatccacactacgacaggcggcgtaaaacacaaaaggcccacacccaacgcccgccgcaacaaagccgcacccacaaagacgaatggcacgccccccaccgcg

SEQ ID NO: 31157 - DNA, 384 bp, Zea mays
  Clone ID: LIB3181-009-P1-K2-B2
cctcgctcgccgccatggaaggttcgaaggggagtggaggtggtggggccggtgccgggtccgaaaagccaagcgccgagtcgaaccctagtctgaatctgccgccacctaccgcagcggatgtcgaagccacggatgacggtggcgccacggccgcggccgcggcagctgccgaggcggccaggcggccgttcactgccctcagccaggaggaggctgacctcgccctagcccgcgtcctgcaggagcaggagcgggcgtacatgttgctccggatgaacgggagcggtggcgagggcagcgactacgggagctctgatgcaaggagctacgagtacgacgaagagggagatgactacgaagaggaactggagcaccaccttc

SEQ ID NO: 31158 - DNA, 116 bp, Zea mays
  Clone ID: LIB3181-009-P1-K2-B4
aacacatcattggtggtgccctcttttagattgcttattagttgtaattcaataataaagttttttggatgatgtatgtggccaaccagaaataagaagttacatttccagattct

SEQ ID NO: 31159 - DNA, 385 bp, Zea mays
  Clone ID: LIB3181-009-P1-K2-B6
gcgaaaagagggaaaagaaagccagcgagagagactttaaggggaagatgagccggagccgggggatcccggtgaagttgctccatgaggcagcgggtcacgtggtgacggtggagctcaagaccggcgaagtgtaccgggggtcattggtcgagtgcgaggataactggaattgccagctcgagaacataaccttcactgccaaggatgggaaggtttcgcagctggagcacgtcttcatcagaggaagcagagtgagatttatgattatacctgatatgctcaagaacgctcccatgttcaagcgcttggaagcgaggattaggggcaaaggatcagctattggagttggtcgtggacgtgcttgtgcaatgcgtgctcgggc

SEQ ID NO: 31160 - DNA, 229 bp, Zea mays
  Clone ID: LIB3181-009-P1-K2-B7
cgacccacgcttgctcggacgcgtgggtaggcgacctttttctgtgacctgtccatccaatccaacgcgggctgggagcagcagtctctcgtaagctaggatcactattccgccaccgtgccaagtagtcgtcctgtcactggcgaccattctgcaccgagccgtgtacgacgacgcccagttgaccgccgtgccgaccgtggatgcgcccaggctgttttgcgtgagc

SEQ ID NO: 31161 - DNA, 440 bp, Zea mays
  Clone ID: LIB3181-009-P1-K2-B8
cgatgacattgcgaagtgcaatacgggtgcacggtgaagagagcctggacgctgatggcttcttccatcagaacggtttcagcaacagcaaggagtcaaggcgagcgaggaagtccaagaagagatggccctgctgcttaatccctaccactatgggatgatgtgggcccatcgtaggacctcgttcgttcaagttaagttgctgattttttgagtgtactattaacaaacagtaaactacagaaatttagcgcttcgtcagttacacgatgtgggttcagacggtatgctatagcgcgtagataacgtcttgataaatgtaaagtagaatcgttgtaaacaacacgtaattcttctcacgagagctctgatttggggtatatgggtaaagtatatgggtaaagtacatatactattattttcacgcatggtggttatgc

SEQ ID NO: 31162 - DNA, 313 bp, Zea mays
  Clone ID: LIB3181-009-P1-K2-B9
aaaacccggctcgacccactcatccggtttttttttgaaaggctgatccaataatttaggagacaagattctgcgactgaggagtggttataaatatataaaaaactcaacccaatgtccataaaaattaaaaaaaatttaacttataaaaatattaatatacttaaattaaaaataaaattgtcttcacttttttataaattcaaaattttacttacaccttgattgtccactataataatttttttttatttgtgtaacttaaattaaattaatttgccacattgtttacaactttattactagcaaaaac

SEQ ID NO: 31163 - DNA, 458 bp, Zea mays
  Clone ID: LIB3181-009-P1-K2-C3
cacaaaaggcagaagttcaggtcgataggagaaaaatgaccatgcacgccgccgctacttccttctgaatcttgaccgatctgagctgcgggccgtcgtccaaggcgaaaggagggcagccggcggcggcgccgggctccggcggcgacaggcaggggaggggcaagatcgagatcaagcgcatcgagaacacgacgaaccggcaggtcaccttctgcaagcgccgcaacggcctgctcaagaaggcgtacgagctctcggtgctctgcgacgccgaggtcgcgctcgtcgtcttctccagccgcggccgcctctacgagtacgccaacaacagtgtgaagtccaccattgagaggtacaagaaggccaacagtgacacctccaactctggcacagttgcagaagtcaatgctcagcactaccagcaggagtcctccaagctgcgccaggcgatcgat

SEQ ID NO: 31164 - DNA, 314 bp, Zea mays
  Clone ID: LIB3181-009-P1-K2-C4
gcgggagctagctgacggccgcgcgctttcgtcttttgtcctttaatttcgcagcattccgcgcgcttggtctctcggaggcgtggcggtagcctgtgccggtgtgcctcggagctccggcctccgggaataaacataggggtatcgccatgcaggcggcggccaagacgaggaatggctccttggaacaccccacccggacgtcctccctgggcggtaacaagggccgccggacggcgaggatggccgagtcgcccaccggcctcagccccaaggtcgaccgccgcacggctgtgagcgccgagagagagaaa

SEQ ID NO: 31165 - DNA, 209 bp, Zea mays
  unsure at all n locations
  Clone ID: LIB3181-009-P1-K2-D3
gctgaccatcccttngcgtgggtatacaaggccgaccgatcgccttcaacagtggcagctgagcaatggaccccctgacggcattacgcggggtgtgggtacccgggccgtcactgcggcctacgccgtctttgttttcttcttttgccgtcgcggtttccgaagttaatggggtcctttaggtcgttaggttacgactgaccaaaact

SEQ ID NO: 31166 - DNA, 432 bp, Zea mays
  Clone ID: LIB3181-009-P1-K2-E3
tgcaaattcccccttagttgcctcctccgtcttcgctccctccgcagcgtcagatcggccgtcgctcgccgagccctagcgccgccgatcgcagcccgtaccagtcttgcagatcggggtcgcgccgcggcggcaagaacgatggccgaggaggccaagtacctggagacggcgcgggccgaccgctccgtgtggctcatgaagtgccccccggtcgtctcccgcgcctggcaggccgcctccgcctccgcctcttcctccgacgccgctaacgccaaccccgttgtcgccaaggtcgtcctttccctcgacctgctccgcccagaagaacgccccgaagagcgcccggaagagcccacgctccagttcaagatggagttggcacaaactaacactgggaatacacctaagagctactctttgaatatgttc

SEQ ID NO: 31167 - DNA, 429 bp, Zea mays
  unsure at all n locations
  Clone ID: LIB3181-009-P1-K2-E4
tgcaaattcccccttagttgcctcctccgtcttcgctccctccgcagcgtcagatcggccgtcgctcgccgagccctagcgccgccgatcgcagcccgtaccagtcttgcagatcggggtcgcgccgcggcggcaagaacgatggccgaggaggccaagtacctggagacggcgcgggccgtccgttccgngtggctcatgaagagccccccggtcgtcttccgcgcctggcatgtcttcttcgtctccgtctattactcctacgccgattactctaatcccgttgttatcaaggtttgttttttcattgtcctgctccgtctataagaactttcttgagagcgctctggtgagccctacgcttcaatttatgatggtgttggtacaaactaacattgggaatacacctaagtgctactctttgaatat

SEQ ID NO: 31168 - DNA, 229 bp, Zea mays
  Clone ID: LIB3181-009-P1-K2-E8
cgtcgacccactcggctttgtctattggcctgaaatattcagaggtgattgctgggtgctggtttcatgtctgctactttgtgctgtaaattcggccacattgaaacttgcagcgaggtctgatcgtgcggatattcctgtgcctgggctgtgttgtgaacttattttacaactgatagtatttacatctggttgactatcagaaaacacactttcatggggtacctca

SEQ ID NO: 31169 - DNA, 135 bp, Zea mays
  Clone ID: LIB3181-009-P1-K2-F10
ctcaacagtgttctaccaacaacccatcattggtggtgccctcttttagattgcttatgagttatagttcaataatgaagttttttggatgatgtttgtggcgtcccagaaataagaaagtacatttctagattc

SEQ ID NO: 31170 - DNA, 407 bp, Zea mays
  Clone ID: LIB3181-009-P1-K2-F11
ctgactgcctcgagcagcagagagcatggaggccgagggcgggatgacgatccggttcgtgctgttcgtcaacaagcagggccagacgcggctggcgcaatactacgagcacctctccctcgacgagcgacgggccctcgagggcgagatcgtccgcaagtgcctcgcccgcactgaccagcagtgttcgtttgtggagcaccggaactacaaggtcgtttacaggcgctacgcctcccttttcttcctcgtcggcgtcgacagcgatgagaatgagttagctatccttgaattcatacatcttctggtggaaactatggatcgccacttcggcaatgtgtgcgagcttgatatcatgttccatctggagaaagtgcacttcatgctggaagagatggtgatgaaat

SEQ ID NO: 31171 - DNA, 414 bp, Zea mays
  Clone ID: LIB3181-009-P1-K2-F2
gtttctaccagctcttagtcaactagccatggtgaaccctgccacatacctgcaacagcaacaactgctttcatctagcccactcgctgtgggcaatgcggctacatacctgcaacagcagctgctacaacagatcgtaccggctcttagtcagctagttgtggcgaaccctactgcctacttacaacagcttcttccattcaaccaactagatgtggcaaactctgctgcgtacctacaacagcggcagcaactacttaatccacttgcagcggctaacccattggtcgccgccttcctgcaacagcaacaatttctgccatacaaccaaatctctttgatgaaccttgccttgtcaaggcagcaaccgatcgttggaagtgccatcttttagattacaaatgagatgtactt

SEQ ID NO: 31172 - DNA, 447 bp, Zea mays
  Clone ID: LIB3181-009-P1-K2-F3
ggcggaaccttcacggaacaaccatcctaaacgagcatttgtgattgatctagaggtgccggcttgtgaagaggatgctgcttgggattttgatcaagaatgtgcacagcctaaacctgatgcacaccaggaagttgacggcagatctgatacatctgctctagctgcagctgagaacatcgtagcgttgtcaaggattattccaacagctctagaggcatctgatgatatgttgcagtggtttgcagatctcgctgtattgaacatcaaggaccttgctgagcaagctgaactccaagcttgtaccaatgattccagtaacgacgagtcagattcattcgaatccttgacactgaagctggaagagaccaagattgatgagtactggagcaggccactggaacctgaaatcacaaccgatgaacaattaatttcaactgctcacct

SEQ ID NO: 31173 - DNA, 414 bp, Zea mays
  Clone ID: LIB3181-009-P1-K2-F4
cagcgacgccgccagccagacccgatcccctccctcgctagggttttcgtccccgcgccggcgcgctcccggatcccaccgaaacaaccatggccggcggtcccgcggcggtgtcgttcctgaccaacatcgcgaaggtggctgcggggctcggagccgcggcctcgctcgcctccgcgtcgctctacaccgtcgacggcggcgagcgcgccgtcatcttcgaccgtttccgcggggtgctcccggagaccgtcggcgagggcacccatttcctcgtgccctggctgcagaagcccttcatctttgacattcgcacgcgcccgcacaacttatactccaactcggggaccaaggacctgcagatggtcaacctcacgctccgtgtcctctgccgccccgacgtacagcaccttc

SEQ ID NO: 31174 - DNA, 456 bp, Zea mays
  Clone ID: LIB3181-009-P1-K2-F5
gggccgaccacgcgtccgcagcgacgccgccagccagacccgatccccttcctcgctagggttttcgtccccgcgccggcgcgctcccggatcccaccgaaacaaccatggccggcggtcccgcggcggtgtcgttcctgaccaacatcgcgaaggtggctgcggggctcggagccgcggcctcgctcgcctccgcgtcgctctacaccgtcgacggcggcgagcgcgccgtcatcttcgaccgtttccgcggggtgctcccggagaccgtcggcgagggcacccatttcctcgtgccctggctgcagaagcccttcatcttcgacatccgcacgcgcccgcacaacttcttctccaacttggggaccaaggacctgcagatggtcaaccttacgcttcgtctcctctgccgccccgacgtccagcaccttcccaccatcttcaccttccttggac

SEQ ID NO: 31175 - DNA, 427 bp, Zea mays
  Clone ID: LIB3181-009-P1-K2-F6
cggacgcgtggggggaggcattcatcagggttatatttggttgtcaaaaagtactgtacggaattcacatctttcacatttttcactagcaatagcagccccaaattgctttcctgactaggaacatattctttacagcttctccatcagactgatgatcccatattcagtgtgctgcaagtgatttgacatatgtggcttatccttcaggggagctgcctgatcatttatgtcagcagacagctacagaagaagttcctcctatggaatcattgcagaagggacattcccctgaacttcataagcgcatcacatgcttacggcctgccgataataatcatccgcgtggcgaattgaattggatccacatgcgacgggaggagcgagtgcgtaatagtagcacggctactccatcctactggcgttg

SEQ ID NO: 31176 - DNA, 444 bp, Zea mays
  Clone ID: LIB3181-009-P1-K2-F7
cccgattcaagtcagcggtttttagggttcgagatctcggcatcgtgtcgcggaagccatggcgacaagcatgcttagtaccgtgaaggtgagcaatgtatcgctgaaagcagcacaacgtgatataaaggaattcttttccttttctggtgacattgtgcatgttgaaatgcagagtttggatgagctttctcaagttgcctacattacttttaaagacaaacaaggagcggagacggcaatgcttctcacgggggccaccatagttgatatggctgtaatcgtcacaccagcaaatgattatgagctaccatcttctgttttagttgctcttgagcccaaagacacaaaaccttttgcccttcaaaaggccgaggacattgttgggaccatgctggcaaagggatttatccttcgtagggatgcacttgacaaagcgaaagc

SEQ ID NO: 31177 - DNA, 233 bp, Zea mays
  Clone ID: LIB3181-009-P1-K2-F8
aaaccgggccgcccaccttcacctaacagtctccacaccttttttttattctccccattttaaaacggccgccgggtttacttgcattcataatccccccaacacaaccactgtatctctctaatcatcacaacttttctctatttgaattctttaacttttattaacacatcttactttctataatacttaattttcttttatcatttctatcttacctacatcactcttat

SEQ ID NO: 31178 - DNA, 297 bp, Zea mays
  Clone ID: LIB3181-009-P1-K2-F9
gcagcactgggactagtcagacgttttttgtttacgtagacccataagattatggggtggggtttttcattttcttcatcggccttcaattgaggcaaagctcggtcctagcgtctaagatgcctgcgtgatgatacatggattcaaaagaattgtttgcttatctggcccactttccgcactcctttgtgcctttactcgtgtaatatactaatatgtcaggcccgtttaaacaacatttataaactacctttgaaggtcatgtagttttcaaaaaaaaaaaaaaacgtctgacgt

SEQ ID NO: 31179 - DNA, 421 bp, Zea mays
  Clone ID: LIB3181-009-P1-K2-G1
atgccggacgccgatgggaaggcccgctcggcggactcctcgtcctcttacgggtacccgccgtcggcgccgccgcagcaccagtacggcacctttggccccccatccggagcctccggggagtttccgcagccggcggtcgggttcccccagccggcgccgccgcctgggatgcagcactacccgcagcctcctccggcgtcgtatgccgtctacccacccccgcagcaaccctactcggccgccgcgccgtactacgcccaaggctaccagatcgctcaaggttatattcctgttgttgaaggaaggcctgttagaatgcgtcctcttccatgttgtggccttggcatggggtggtttctggttataattgggttcttctttgctgccattccatggtatcttggagcttttgtgctga

SEQ ID NO: 31180 - DNA, 61 bp, Zea mays
  Clone ID: LIB3181-009-P1-K2-G12
aaaaaaaaaataataaatataaatttattttaaaaaaaaaaaaataaaaaaagggggaagg

SEQ ID NO: 31181 - DNA, 421 bp, Zea mays
  Clone ID: LIB3181-009-P1-K2-G2
aagcaacatacaaagcacaatagtgtaccatcaatgtcagccaaaatattctgcttccttgggctccttggtctttctgcaagtgttgctaccgcaaccattttcccacaatgctcacaagctcctatagcttcccttcttcccccatacctctcaccagcggtgtcttcaatgtgtgaaaacccaattgttcaaccctacaggatccaacaggcaatcgcaacaggcatcttaccattatcactcttgttcctccaacaaccgtcagccctattacagcaggtacctttggtccattttgtggcacaaaacattatggcacaacaactacaacaacttgtgctagcaaaccttgttgtatactctcaacaacatcagtttctttcattcaaccaactggctgcattgaactctgctgctt

SEQ ID NO: 31182 - DNA, 318 bp, Zea mays
  unsure at all n locations
  Clone ID: LIB3181-009-P1-K2-G4
gcgnncggctccngctcgtctccttctacaccgcgcatttctttgtgcttccggaaccctagcgccgggtctgtgtttacagaaacttaattcactaatcccctatcgaagctgtatgaccaccttaagctcgcgcggtactacactctctagggcctctacaacacctccttcttcttcttcgacggcgccattgtccatatcaacaagcatctaactacttcggacgatgctcttattcgtacgaaatgaatgaactgcatgaaagcaatttttgaagaagtggtaattgtgaaacagctggatgctcaattaaag

SEQ ID NO: 31183 - DNA, 149 bp, Zea mays
  Clone ID: LIB3181-009-P1-K2-G6
actaacaaacctccaggcggcaaccgttagacgcatgccattcttcggctattggaacctcttatgtgatcatttgttgagaattattgatccgttacttgtaagaataaacatgtttctagtatctttgatggtgatcttcattataa

SEQ ID NO: 31184 - DNA, 299 bp, Zea mays
  Clone ID: LIB3181-009-P1-K2-G7
gctgagggaaccgcaccggcagtgacttgtgcgttgccaaataaagctactactagggacggctcgattgtcgtcgcagccgccctcccgccggagatgggtgcgccggcgctgtcgtccgtcgtcgtggtggccacggcggcagtggtttgcctgtgcggggcctttgcgcgggcgcaggacatggacagtgagtgggcgcggtcgtcctaccgcggtttctttggctccccggccgggtcgctgctgtcgcagttggacttggacctgtttggtgttccttgctgtaacctttaagt

SEQ ID NO: 31185 - DNA, 457 bp, Zea mays
  Clone ID: LIB3181-009-P1-K2-H1
caccaggcaacatagaaggtggaatacagtagcaacaatagagcaacaatggcggccaagatattttccatccttatgctccttgctctttctgcatgtgttgctaacgcgaccatttttcctcaatactcacaagctcctatagctgcccttcttcccccataccttccatcaatgaccgtttcagtatgtgaaaacccagcccttcaaccctacaggctccaacaagcaatcgcaacaagcaacttacctttatcacccctgttctttcaacaatcgccagccctatctttggtgcagtcattggtacaaaccatcagggcacaacagctgcagcaactcgtgctaccagtgatcagccaagtagctctggcaaacctttctccctactctcagcaacaacaatttcttccattcaaccaactgtctacactgaaccctgctgcttatttgcagc

SEQ ID NO: 31186 - DNA, 338 bp, Zea mays
  Clone ID: LIB3181-009-P1-K2-H11
cttcagtatgtgaaaacccagctcttcaaccctataggctccaacaagcaatcgcagcaagcaacatacctttatcacccttgtttcaacaatcgccagccctatctttggtgcagtcattggtacaaaccatcagggcacagcagctgcagcaactcgtgctacctgtgatcaaccaagtagctctggcaaacctttctccctactctcagcaacaacaatttcttccattcaaccaactgtctacattgaaccgtgctgcttatttgcagcaacaactattaccattcaaccagctagctactgcctactcttagcaacaacaactttcttcattt

SEQ ID NO: 31187 - DNA, 410 bp, Zea mays
  unsure at all n locations
  Clone ID: LIB3181-009-P1-K2-H2
acccacgcgnccgctactatctaagctagcatggccatgatgtttcttgcgcgcaacctgtgctctcgtctgcggccaccgctcgccgccgtcgtggcgttctcgacggtccccgcggcgtcggcggtcgcagcggaggcggagaggtcgatactggacgggccgcggaacgactggagccggtccgagatccaggccgtctacgactccccgctcctcgacctcctctttcacggggctcaggtccatagaaatgtccataaatttagagaagtgcagcagtgcacacttctttcaatcaagactggtgggtgcagcgaagattgttcttactgccctcagtcatcaagatacgacactggattgaaggctcaaaaattgatgaacaaagatgctgtcttagaagcagc

SEQ ID NO: 31188 - DNA, 361 bp, Zea mays
  Clone ID: LIB3181-009-P1-K2-H6
gaccacgcgtccgcaactagcaacatagaaagcacaatagtgttccaacaatggcagccaaaatattttgcttccttatgctccttggtctttctgcaagtgctgctaccgcaaccattttcccacaatgctcacaagctcctatagcttcctttcttcccccatacctctcaccagcggtgtcttcagtatgtgaaaacccaattcttcaaccctacaggatccaacaggcaatcgcagcaggcatcttacctttatcacccttgttcctccaacaaccgtcagccctattacagcagttacctttggtgcatttgttggcacataacatcaaggcacaacaactacaaacaacttgtgc

SEQ ID NO: 31189 - DNA, 301 bp, Zea mays
  Clone ID: LIB3181-009-P1-K2-H7
tggtaggaaaccgtccgaccagcgccggaccagacccgccggctggtgtttctggaggagactgctgagaggacgggatgcaacagaggagaggaccgcacccatgtagtcaccgcaagcctggagcactgaactgaaggaacttagtcgacctttcaagccccattggggaagcaccagtgatgtgtgagcttgtccgtaaacccacgaaaagtactggatgagggaatgccgtcaatgtaaatgactatttaaggctatgccacagggcttggcagcgacagtatggaaacacctatgg

SEQ ID NO: 31190 - DNA, 446 bp, Zea mays
  unsure at all n locations
  Clone ID: LIB3181-009-P1-K2-H8
aaacccggccgaccacgcgnccgaacacaccaagcgaagcgcactagcttcaatttaacaacaatggctaccaagatggggggcgttcttgcgcttcttgcgctttccgcgagcgcaacaaatgcgttcattattccacaatgctcacttgctcctagttccattattccacagttccttccaccagttacttcaatggcctttgaacacccatttgtgcaagcctataggctacaacaagcgattgcggcgagcgtcttacaacaaccaattgcccaattgcaacaacaatccttggcacatctaacaatacaaaccatcgcaacgcaacagcaacatcagttcctaccagcactgagccacctagccatggtgaaccctgtcgcctacttgcaacagcagctgcttgcatccaacccacttgctctagcaaacgtatttgcaaa

SEQ ID NO: 31191 - DNA, 221 bp, Zea mays
  Clone ID: LIB3181-010-P1-K2-A12
tgagagctcaagcgtgtcaaatatttattgttctacacgtacagcatgtggaaaggcctaagattggcacagtttggttaccgagctcaccgcctattccagggatcttgaaagggcgtgcgaatcactgagcactttcactagggtgttggatcacttaccttttctactgaacagttggttttattgcatttctactttgtgtaaagggccctgtaaat

SEQ ID NO: 31192 - DNA, 361 bp, Zea mays
  Clone ID: LIB3181-010-P1-K2-A3
gggaattccaagcagagccagcacagccacatcccacatcccgagaggagaagcgagcgcgcgatccagttggtggccgtccccgcccgcacaccatggctacgccgtggtggtggccgtcgctgctgccggcgtggctgagctccagcgcgctatggttcctcgtcgccaacgcggtcgtcgccgcggtcgccatcttgtccaggcgcccgccgttgtcgttgccgtcgtcccgccgacgccgacgtagaagcggcgccaccgacgcgctcacgcggagagccttgtatgcgctgttgcatggcctccgctccttcttcatatttgccgtaccctttcgtctgcttaaacaccaccacgc

SEQ ID NO: 31193 - DNA, 313 bp, Zea mays
  unsure at all n locations
  Clone ID: LIB3181-010-P1-K2-A4
cccacatgtacaagacggaccggccgaagtacgagtcgacggcccgcagctggacgcagaagtacgcgatgggctgacgaacgctttcctgctcgtctgggcgccattgttcccttggatttgttgttggtcgtatgtatccctgatccatctaggatcatcgtattgtattggagtgtatgtatgtcgtcggcctaccatcgttgccatccaccatagtgaggtggttggacatgcttcgnctatatgcacctgtggtttgctttctttgggtcggggctgtttgggttatggtcatcggagacgtttattt

SEQ ID NO: 31194 - DNA, 334 bp, Zea mays
  Clone ID: LIB3181-010-P1-K2-A5
ccaaaatgtacaagacggaccgcccgaagttctagtctacggcccgcagctggacgcagaggtacgcgatgggctgacgaacgctttcctgctcgtctgggcgccattgttcccttggatttgttgttggtcgtatgtatccctgatccatctaggatcatcgtattgtattgcagtgtatgtatgtcgtcggcctaccatcgttgccatccaccatagtgtggtggttggacatgcttcgcctatattcacctgtgctcgccttcctttcggtcggtgcttgttggttaatgttcatcgaagacggggatttcaaataaaaaaaataaaaatg

SEQ ID NO: 31195 - DNA, 427 bp, Zea mays
  Clone ID: LIB3181-010-P1-K2-A9
cgcaaatggaaaggcagaaatgaaaaccagataagccatggaccagcaaccccgcaggctgtatatcgcaggctgctgttcatgtttacagaaccggggtccagtgtcatgccaacagagaaaaaagagcttctgaccaactacatattggtcctaacactttttgccgatgacttcagatccaaccccagcgacatatgtgaggaccttaaaatgacccgccaaaatcttaaaccatactatgaccagttgggatgcaaatctgtgacagaaggtgcttttaagtctactttcatgacgctcccagcccctctcaagttcccaaaggaagttacgagaaagcggcgacggcagtagggcttttatccaaaggagacaaggagagaaaccaatggctatttatctcagaaatggcttgcattacttg

SEQ ID NO: 31196 - DNA, 388 bp, Zea mays
  Clone ID: LIB3181-010-P1-K2-B1
gtgcaggtccgggatcgccgcacgcgctccggagaagggggatggagcgagaagaataagacatcgtcttcgaccaccccggccggcccctgcactcgatctcccagccccttcgtcagccacctcgatctcatccgatgctctagctagggaggctagcttcgcatggattcaccccggggctgcgtcgtcgctgctcctggaccactcgtgccgcccgctctttcttttactcttttctccggcgcctgatggtgatggccagcgccggcgtcaacgtgcccggcgggcgacgaggtacggaacccgaccgctgcgttcgggttcaccccagaatgccggatgcgcaagcgccaccgtctcgagcccctaggatccggcgacgccg

SEQ ID NO: 31197 - DNA, 179 bp, Zea mays
  Clone ID: LIB3181-010-P1-K2-B2
tatcgagaataataaattttcttattttaccaccccgaccgtccccgcgagtcgggctatttttctttccgttacccacctttatctcattctatgctctagctaggcaagctagctttgcatggattcacccgctgttgcatcgacgctgttccaggaccactcttgccgtcgctctt

SEQ ID NO: 31198 - DNA, 383 bp, Zea mays
  Clone ID: LIB3181-010-P1-K2-B3
tataaggaaaaaagatgattggaaactgttttttttattttaaaaaaaaaaaaaaaaaaagggagaaagttttataataattataaaaaaaaaaaaaaaccaaataaaaaaaaaaattaataaaaaataaaaaaataataaaaaaaaatatttaaaaaaaaaaaaaaattttaaaaaaaaaaaaggggggggcggttttgggggtccaaattttatttccgggggtttggggtttttttttttttttttgggggcccctattttatattcgggggggggttttttaaaagtgtgtgtggggaaaaaccgggggtttcccaattttattggttttgagaaaattccctttttggcgggtgggtttattatgaaaggggccccac

SEQ ID NO: 31199 - DNA, 316 bp, Zea mays
  unsure at all n locations
  Clone ID: LIB3181-010-P1-K2-B4
aattnccgggtccggacccatcgccgtccgctagtgcgttgcggcgataattatgttacccccatgtttgggtacctanntctatgtacctannttattatatgccgaaaatctattatgttgtnncctggctnnngaattgaaccctcaaatagaggtttggtttggagaatataaattgnntcccaagattgggattgggcttgtnntaaaagctcaatatnttngttattgaaagtnngttattgggctttaaaaaaaattaaaataaaaaataaataaaaaaaaataaaatataaaataaaaaattataagg

SEQ ID NO: 31200 - DNA, 314 bp, Zea mays
  Clone ID: LIB3181-010-P1-K2-B7
gttctcctgtcgctcttcgtgcggtcgtgcggcacaccaccagaagagcggccgagcggcgcagagaagagagaaccagccgagcggagcggctgcgcttccggagggaggaaggaggatggagaaggctctcaccaagctcggcagcttcacaatctcccgcaaggccaagcaggagctctccgccatcggtgacgacatctcccgtttttcgagcacggtggaggagaaggcaaaatgggtgttcgagaaactcaaagggcacaagaagtcgctccctgatctactgcgcgagcacaaccttcctccaggtc

SEQ ID NO: 31201 - DNA, 313 bp, Zea mays
  Clone ID: LIB3181-010-P1-K2-B8
tgacttttttacgcctgcaatgcgatcaacatagggcatgtatagtgacacataaatgcaacaaactggccgaaggtcaacaacgaatagactggaaaaaccactacgctaccaaacttaatcaacttgctgaagatacacatttggacagccggcgtttttacaaagagggccaagcgcatcgcccttgaagaaagggacgcagctgaatggcaaatgggacgcgccctagcactgtgcattaaacacagagggtgtagagactactcacagggtgacagatacacttgccagtgtcgtagcaagcgatggt

SEQ ID NO: 31202 - DNA, 295 bp, Zea mays
  Clone ID: LIB3181-010-P1-K2-B9
ggagactggagcgtccctgcactgtttttattaaagtcgccggagaagaaggcggggttcgtacgaggagcctcacggttgaagattacaggagtcaggattcaagaagctcaagcttgccgagctgcctgatccgctggacaatacgtctaaggaggatctatctgaactattcacacctctaagtgacatagacgaaagagaagtcaatgctctgttgtgtagtagtgatgacagtgtataaatcgtagtgatacatacgcctgctaacatcgagattactaaagagaaactt

SEQ ID NO: 31203 - DNA, 141 bp, Zea mays
  Clone ID: LIB3181-010-P1-K2-C10
cgacccacgcttccgctaggcatcaacccatcatttaatttcctttttttagaatacacctgacaaggggtcggggatttttccctcatacctccacctcatccctacaaagaattaacatattcgtttactcataacctc

SEQ ID NO: 31204 - DNA, 75 bp, Zea mays
  Clone ID: LIB3181-010-P1-K2-C12
aaaaaaaaaaaaaacaaaaataatttataatttaaaaaaataaaaaacaaaaaaaggggcattttatattaaatt

SEQ ID NO: 31205 - DNA, 384 bp, Zea mays
  Clone ID: LIB3181-010-P1-K2-C6
aatctttcttgctgctccaattcgctctctttactcggccagcggaaggggagaggagggcgagatgacggtggagaaggtggacgcggggctttccgacttcgacgcccacttcgatcgcctcttcgcttccccggacgccgcctccgacggcaaggtgaagctgctgctcttcctggccgaccgcaagcctggctcctccctctcctggtgccccgactgcaacgtggcggagccggtgatctacgagcggctggaggcactggagggcaaggacgcggtgctcctgcgcgcctacgtcggggacaagcccacttggcgcgacccggcgcacccgtggagggtggaccccaggttcgggctcaagggcgtgccaacgctgat

SEQ ID NO: 31206 - DNA, 126 bp, Zea mays
  Clone ID: LIB3181-010-P1-K2-C8
cgaggcagcaacccatcgttggaggtgccatcttttagattacatatgagatgtactcgataatggtgccctcataccggcatgtgtttcctagaaataatcaatatattggttgagatttatctc

SEQ ID NO: 31207 - DNA, 298 bp, Zea mays
  Clone ID: LIB3181-010-P1-K2-D1
aatggattctggaagaggagcggaagatcaaaccacgcaacgccactgagaagaagaagatcgctgaggagaaagctcttctcaaggagataattcgggataagtctctccctcgtttgtgatggttacatcggctgtccttctgatcttgattttttctttctctccacctgcagtccattgaggacaacatctgaaactatgtgccctgttagttagcaaaaccattagcatttctttgcactatcacatctcttcatttgacaataagaaggtcgagttgttttgctctgatgag

SEQ ID NO: 31208 - DNA, 73 bp, Zea mays
  Clone ID: LIB3181-010-P1-K2-D11
attagttgtcattcaataatgaagttttttggctgatgtatgtggcctcctagaaataagaagttatatttcc

SEQ ID NO: 31209 - DNA, 425 bp, Zea mays
  Clone ID: LIB3181-010-P1-K2-D2
ggagacgctgaggaacctgctgcgccgttacgggcccgagtacaagctcatcctcaccggccactcgctcggctccggcatcgccgcgctcatgaccgtgctggtggtcaacaaccgcaaggagttcgacaacatacccaggagccgtgtcaagtgctacgccctcgcgcccgccaggtgtatgtcgctcaacctcgccgtcaagtacgctgacgtcatcaactccgtcgtgctccaggacgactttttgccaagaacaccgactccgctagagtacattgttggttctatcttctgcttgccctgcatgctatttctcatctgcttgagagatacatttaaacaagacaagagaaaatttaaagatccaagaagattgtatgcacctgggcgaatgtatcatatcgttgagaggaaattttgca

SEQ ID NO: 31210 - DNA, 415 bp, Zea mays
  Clone ID: LIB3181-010-P1-K2-D4
agcaataatcaccacaaccaagcgtcgaaggacataatggatgtacacgatgacctggatgtgttccttcgtaccgagacccagggaaacaaatatttggctgtgagcattacaaaagaaactgcaagcttgttgctgcatgctgcaataagctattcacttgcagattctgtcacgataaagtaactcaataagtccacttattgactcttatgaccatgtaattggtgttaatacaactacattaacatgtaaaggttggtagatctggaaggtcttgatggtctaatacctatctatgagtacggaagaaaaggcgggagaagtcggtctctgcagcatcgcgcgtgaaaaaaaatcagccaattccacgagcattgatgttgtcatgacttcaaaagaggagagaccatgc

SEQ ID NO: 31211 - DNA, 331 bp, Zea mays
  unsure at all n locations
  Clone ID: LIB3181-010-P1-K2-D5
cagcatacatactactaccattcatgccagctatgtttggtgtgtagccctgcatatccttcttgacacgaaccacatgtngttgccgttctaccagcaccgttgcagcctaactgctggcactcctcttacaacatgcaacaatttgctgccattcaaccaactntgctttgacaaacccagcagtgttctaccaacaacccatcattggtggtgccctcttttagatttcttatgagttatagttcaataataaagttctttatctgatgtttgtggcttcccagaaataagaaaagacgtccctaacgaaagaacttaccagcagtgg

SEQ ID NO: 31212 - DNA, 405 bp, Zea mays
  Clone ID: LIB3181-010-P1-K2-E3
cctggaccttctggttcgacaacccgcagagcaagtccaagcaggccgcctgggggagctccatccgccccatacacaccttctccaccgtcgaggaattctgggggctttacaataacattaatcaccctagcaaattgatcgtgggagctgatttccattgcttcaagaacaagatcgagccaaaatgggaagaccctatttgtgcgaatggtggtaaatggaccatcagctgtggaagaggaaaatctgatacattttggctgcacactctgctggctatgattggtgaacaattcgactatggtgatgaaatttgggggccagttgtcagtgtgcgtgggaagcaggaaagaattgctatctggacaaaaaatgctgccaatgaagctgctcaggtaagca

SEQ ID NO: 31213 - DNA, 363 bp, Zea mays
  Clone ID: LIB3181-010-P1-K2-E5
ccaatcttacacactcctgcattctacgaaattcttcttttattgcgacaccaccaaccaacggactggtcgtctttttactacttccatcctcaaaaaaccctgacgctactcaactctatctactcccagcacatacttccatcgacacattgagcaatatcgaactctgccgctcatatacaccatccacacatacgaccattcagcctggcaaatgatacgcgccctgttgcctcccatacacaacaacagtttgtggtcgttacacccacacgctacgcctaactcttcaactccctaacaaccgctacaattgctgtctttcaaccaactttcttcatacaaactcaacattttctc

SEQ ID NO: 31214 - DNA, 400 bp, Zea mays
  Clone ID: LIB3181-010-P1-K2-E6
cctagccctgcttctttgccatggcgagcattgctagccaggcgagcctcctgctccagaagcagctcaaggatcttgcgaagaaccccgtggatgggttctccgccgggcttgtagacgacagcaacatcttcgagtggcaggtcaccatcatcggaccgcctgacaccctatatgatggaggctacttcaatgcaataatgaccttcccccagaactatcccaacagcccgccatcagtaagatttacttctgagatgtggcatccgaatgtttatcctgatggacgtgtttgcatttctattcttcatccacctggtgaagatcccaatggttatgagcttgcaagcgaacgatggtcaccagtgcacacggttgaaagtatagttctgagcataat

SEQ ID NO: 31215 - DNA, 430 bp, Zea mays
  Clone ID: LIB3181-010-P1-K2-F2
ggggcgcagaggcagaggcttgccagcctacctagctcgtcggggccctatggagatccagcaccaccgggggctgggcaactccaaggttgtcaaggtgcagagcgaggaggcgtgggatctgttcaccgatcaagcgagcaacgagggccggcccgttgttgcccatttcggggcgtcatggtgcgtgacgtccctgtccatgaactacaagtttgaggagctggcgcagacccaccccgaggtcttgttcctctacgtggacgtcgacgatgtccagagtgtttcatccaggtacggagtgaaggccatgccgacgttcttcctcatcaagagcaaggaggtggtggggaagatcgtcggggcgaacccagacgaggtgaagaagctggtggatgcttccgccgagcccttggagactcaaatagtc

SEQ ID NO: 31216 - DNA, 405 bp, Zea mays
  Clone ID: LIB3181-010-P1-K2-F4
atagaaagcacaatagtgtaccaacaatggcagccaaaatattttgcctccttatgctccttggtctttctgcaagtgctgctacggcgaccattttcccgaaatgctcgcaagctcctatagcttcccttcttcccccgtacctctcaccagcggtgtcttcggtatgtgaaaacccaattcttcaaccctacaggatccaacaggcaatcacagctggcatcttacctttatcacccttgttcctccaacaatcatcagccctattacatcagttacctttggtgcatttattggcacaaaacatcagggcacaacaactacaacaacttgtgctagcaaaccttgctgcctactctcagcaaacagcagttcttccattcaaccaactagctgcattgaact

SEQ ID NO: 31217 - DNA, 446 bp, Zea mays
  unsure at all n locations
  Clone ID: LIB3181-010-P1-K2-F5
cacgcgtncgatagaaagcacaatagtgtaccaacaatggctttcaaaatattttgcctccttatgctcctgggtcttgttgcaagtgctgctaccgcgaccattttcccgaaatgctcgcaagctcctatagcttcccttcttcccccgtacctctcaccagcggtgtcttcggtatgtgaaaacccaattcttcaaccctacaggatccaacaggcaatcacagctggcatcttacctttatcacccttgatcctccaacaatcatcagccctattacatcagttacctttggtgcatttattggcacaaaacatcagggcacaacaactacaacaacttgtgctagcaaaccttgctgcctactctcagcaacagcagtttcttccattcaaccaactagctggattgaactctggttctatttgcaacaacaacaactacca

SEQ ID NO: 31218 - DNA, 430 bp, Zea mays
  Clone ID: LIB3181-010-P1-K2-G1
gccgccctttttttttttttttgaacattgaagtgttttgtttgtatcagtctcagttcagctctcgattcttatcgactaaatattcatttataagatttcatggccccatacatgtaacagtgccgccaacaacaatattgattgataaatacaatgtgaggcgtcctctgttaggttacctgtggagttctggatatcctttccggtagcaaccaattacagatttacaattgatctagcaaagggctcccctctttggcaagaataaacaagcctccatcgcctctcgagatccttaagtctttgtccaggtaggtagtcaagagccaggatcgagctctgttgttgccgggaattggtaccttgaggggtggctgcccagaaatggacccagcaatgctagcaaatgcttgctgcaatggattca

SEQ ID NO: 31219 - DNA, 257 bp, Zea mays
  Clone ID: LIB3181-010-P1-K2-G2
gtggatcgcctggtcaaggtccgtgtgctttttaaggtggatcgcgtgactggcagtgagtgttgctgcttgtgtaggacgcgttacgtacgggttttattttggttccaagtcaaaagtcacggtcggtctggatgttgtgtactgggtttgttgaattatgagcagctgcgcgttgtaattcggctgggctacctggatgcgttaataattgctttggtttctgccccaaataaatataaaaaaagaataaaatg

SEQ ID NO: 31220 - DNA, 61 bp, Zea mays
  Clone ID: LIB3181-010-P1-K2-G5
tcctcatgcacttatttataggtcctaaataatatgccgcgtacaacttgactggaaaacc

SEQ ID NO: 31221 - DNA, 324 bp, Zea mays
  Clone ID: LIB3181-010-P1-K2-G9
gggggccgacccacgcgtcctttaaaaaaataataaaaaaaaaatatatttttttaaaaaaaaaaaaaaaataaagagaaaaggtgaattttaaatttaaaattaaaaaaaaaagggccggcccttctatatgattccaagtttactttcccatgctttcaacttataaacttttttatattgtcacctaatttcaaatcactgtccgtaattttacaactcctttactgaaaaaaccctttcgtatccaatcttatatatctataatatctatccctcttttaaccttttgttttatattttaaaataccttactaaacttct

SEQ ID NO: 31222 - DNA, 418 bp, Zea mays
  Clone ID: LIB3181-010-P1-K2-H2
tggagatccggaagcgctcttcaaagaagactcgacgccatcagctaaagcttctcccctgcggactgggtcggaggatcctgtggcgccaaagcccaaggacgcggcctttgctagaggcaagccgtatgctgagccagcaacccataaacacggtgctaataccagctatgaaagaaaaaccggcacggagagatcgcctctgcatcctcaccaccaagcaaggctcgtaaacagaggaggtgtttcgtctccttcatgggaacgcaggggttcgtcagaaggaaaccgtggagctgcgcccaccacacctgggaggtcgtccaagatgaggccaggcggccgtggagacgagacgcctgagagaggatctgccgtgcccaagtttggagaatgggacgagaaagatccctccaca

SEQ ID NO: 31223 - DNA, 183 bp, Zea mays
  Clone ID: LIB3181-010-P1-K2-H6
gacctgctgtacaacggcggcatcggcacctacgtgaaagccgcgcgcgatacgcatctgcaagtgggcgaccgcgcgaacgacgcggtgcgcgtgaacggcgcggagctgcgctgcaaggtcgtcggcgaaggcggcaacctcggctgcacgcagttcggccgcatcgagttcgcgcagcgc

SEQ ID NO: 31224 - DNA, 392 bp, Zea mays
  Clone ID: LIB3181-010-P1-K2-H8
gttggtgaccttctctttggtcatggtggtcatcgggcgctttgtcatcaagttcttcctacttgaaatcgctgcctgggtgatgttcatcttcctagagacgtacacgagaatgttctggtcagcggaatcgctgtactataatccagcttggcacatcattgtttcttcctgggaaaccatcgtgtacagcccaattcttgatctggacagatgggccgtcccaattgtcataatgctattatttggggttctttactggagatgcttcggtggtagaaggaagcggtgaaggggttcgctcctcccattgtacaagaattcttataactcgagtcgtcgctcgagatcagactagttatacacgcaatgttcaagttttttctttaaag

SEQ ID NO: 31225 - DNA, 414 bp, Zea mays
  Clone ID: LIB3181-010-P1-M1-A10
tcgcgcaaatggaaaggcagaaatggaagcggtttttttcatggaccagcaaccccgcaggctgtatatcgcaggctgctgttcatgtttacagaaccggggtccagtgtcatgccaacagagaaaaaagagcttctgaccaactacatattggtcctaacactttttgccgatgacttcagatccaaccccagcgacatatgtgaggaccttaaaatgacccgccaaaatcttaaaccatactatgaccagttgggatgcaaatctgtgacagaaggtgcttttaagtctactttcatgacgctcccagcccctctcaagttcccaaaggaagttacgagaaagcggcgacggcagtagggcttttatccaaaggagacaaggagagaaaccaatggctatttatctcagaaa

SEQ ID NO: 31226 - DNA, 335 bp, Zea mays
  unsure at all n locations
  Clone ID: LIB3181-010-P1-M1-A12
tcgtgagagcncaagcgngncaaagagctcgtttgttttcgtacagcatggggcaaggccaaacaanggcacaggtaggttaccgagctcaccgcctattccagggatcttgaaagggcgtgcgaagcacgagcactagcgctagggtgttggttcactttccttttcgtctgagcagttggatttattgcatttctccgatgtgtaaagggccctgtaaattattaggcaagcgggagcgtagcttgatctaatttagctctgcaccagattggtagaacgaccggtgctctaagtagttgtgtaactataactatccttgaatcgggttcttt

SEQ ID NO: 31227 - DNA, 284 bp, Zea mays
  unsure at all n locations
  Clone ID: LIB3181-010-P1-M1-A3
tcggggttttccaaccacagccaacacaggcgcagcgttcatttttagaggagaagcgagcgcccgaaccaaangggggccgnccccgcccgcacaccatggctacgccgaggtggtggccgtccctgctgccggcatggctgagccccagcccgctatggacacacaccgccaacccgggcctcgacgcggtcgccatattgtacaggcgcccgccgctgacgatgccgtcaacccgacaccgccgtcgcaacagcggcgccaccgacaggctcacgcggaga

SEQ ID NO: 31228 - DNA, 317 bp, Zea mays
  Clone ID: LIB3181-010-P1-M1-A4
tcgcccacatgtacaagacggaccggccgaagtacgagtcgacggcccgcagctggacgcagaagtacgcgatgggctgacgaacgctttcctgctcgtctgggcgccattgttcccttggatttgttgttggtcgtatgtatccctgatccatctaggatcatcgtattgtattgtagtgtatgtatgtcgtcggcctaccatcgttgccatccaccatagtgaggtggttggacatgcttcgcctatatgcacctgtgcttgccttccttcgggtcggtgcttgttggttaatgttcaatcgagacgttgatttc

SEQ ID NO: 31229 - DNA, 334 bp, Zea mays
  unsure at all n locations
  Clone ID: LIB3181-010-P1-M1-A5
tcgactacatgcacaagacggacaccacggggggccgttggattgtccgcacgccggctcanaaanacgcgaggggcngacgaacgcttaactgctcgtctacacgccatagaagcctcgaatgagttgttggtcgcatgaaaccctgaaccaactaggaccaacgaatgggaaagcagagtatgtaagtcgacaggcaaccatcagggacatccaccataatgaggaggttgaacacgctgcgcctacatgcacctgaactcgcactacatagggacggtgcgtggaggttaatgtccatagaagacagggaattcaaaaaaaaaaaacaaaa

SEQ ID NO: 31230 - DNA, 405 bp, Zea mays
  Clone ID: LIB3181-010-P1-M1-A9
tcgcgcaaatggaaaggcagaaatgaaaaccagataatccatggaccagcaaccccgcaggctgtatatcgcaggctgctgttcatgtttacagaaccggggtccagtgtcatgccaacagagaaaaaagagcttctgaccaactacatattggtcctaacactttttgccgatgacttcagatccaaccccagcgacatatgtgaggaccttaaaatgacccgccaaaatcttaaaccatactatgaccagttgggatgcaaatctgtgacagaaggtgcttttaagtctactttcatgacgctcccagcccctctcaagttcccaaaggaagttacgagaaagcggcgacggcagtagggcttttattcaaaggagacaaggggagaaaccaatggctattta

SEQ ID NO: 31231 - DNA, 341 bp, Zea mays
  Clone ID: LIB3181-010-P1-M1-B1
gagtagggggatggagcgggaagaataagacatcgtcttttaccaccccggccggcccctccactcgatctcccagcccctccgtcagccacctcgatctcatccgatgctctagctaggcaggctagcttcgcatggattcacccgcggctgcgtcgtcgctgctcctggaccactcgtgccgccgctcttcctcttactcttcctccgccgcctgatggtgatggccagcgccggcgtcaacgtgcccggcggcgacgaggtacggaacccgaccgctgcgttcgcgttcaccccagaatgccggatgcgcaggcgccaccgcctcgagccccaaggat

SEQ ID NO: 31232 - DNA, 73 bp, Zea mays
  Clone ID: LIB3181-010-P1-M1-B10
attagatggcattcaataatgaagtggtttggcttttgtatgtggccccctacaaataataagttatatttcc

SEQ ID NO: 31233 - DNA, 160 bp, Zea mays
  Clone ID: LIB3181-010-P1-M1-B2
acttttctttttgggaggagcgacaaaagggacaggtgtttaccaccacgccgcccctcacttgactaaaaaccctccatagcccctcatctcatctatgctctactaagcagataactttgcatggactacccaacctttttctacttctcctggacca

SEQ ID NO: 31234 - DNA, 264 bp, Zea mays
  Clone ID: LIB3181-010-P1-M1-B3
tcttattatggaaaaaagataattgaaaactgattgtttattattaaaaaaaaaaaacaaaaaaaaaaaaaaaaaaaaaaaaaaaaaataaaaaaaaaaatcccataaaaaaaaaaaataaaaaaaaaaacataaaacacaaaaataaaatcttttaaaaaaaaataaaaaaggttttaataaaaaaaaaggggccccccttttttaaaaaacaaaaatttatttacccccctacttacaaataaaatacattttttatagtgg

SEQ ID NO: 31235 - DNA, 179 bp, Zea mays
  Clone ID: LIB3181-010-P1-M1-B4
tcgctatgcgtgcggcgaaattagttacccatgttgggtactatctatgtactattattatatccaaaactatagttgtcctggctgaattgaactcaaaagggtttgtttgagaaaaaattgtcccaagattggattgcttgttaaagctcaatattgttattgaagtgttattgctt

SEQ ID NO: 31236 - DNA, 123 bp, Zea mays
  Clone ID: LIB3181-010-P1-M1-B6
ccgcagaccgaccgaataccggtcgaccacacttttattttcatcatacaacaacaacaaagggggcgggttttttttttatgctcgagaccgaaccctaccacacatatagcaactcgccca

SEQ ID NO: 31237 - DNA, 317 bp, Zea mays
  Clone ID: LIB3181-010-P1-M1-B7
tcggttctcctgtcgctcttagtgcgggcgtgcggtacaccaccagaagagcggccgagcggcgcagagaagagagaaccagccgagcggagcggctgcgcttccggagggaggaaggaggatggagaaggctcttaccaagctcggcagcttcacaatcttccgcaaggccaagcaggagctctccgccatcggtgacgacatctcccgtttttcgagcacggtggaggagaaggcaaaatgggtgttcgagaaactcaaagggcacaagaagtcgcttcctgatctactgcgcgagcacaacctgcctacaggtc

SEQ ID NO: 31238 - DNA, 222 bp, Zea mays
  Clone ID: LIB3181-010-P1-M1-B9
tcgggagactggagcgtccctgcactggggttattaaagtcgccggagaagaaggcaacgttctacgaggagccgcacggtagaagattacaggagtcaggattcaagaagctcaagcttgccgagctgactgatccgctggacaatacgtctaaggaggatctatctgaactattcacacctttaagtgacaaagacgaaagaggaagcaatgctcttgtt

SEQ ID NO: 31239 - DNA, 326 bp, Zea mays
  Clone ID: LIB3181-010-P1-M1-C3
tttctttttcatccgcagcagacgacccaaggggacggtttcttgcatgcaacaacacacctctcaaataatgccaacaacacggaaaacaccccacgcagcgaaccaacaaggagactggcaaacacctgattcaccgaactgaatcccgttgggggacaggcgcataccgccaccgggactgatcccaaacaggcccacaccgagcgacgcggccaacaccggcacaggctgaacaggcaatggaacgcaccctggaccctctcaaaaatcccagcgtacggacacgtgacacccacaccaaccgctacacatggcggcaccct

SEQ ID NO: 31240 - DNA, 165 bp, Zea mays
  unsure at all n locations
  Clone ID: LIB3181-010-P1-M1-C7
gcccgcaggnaccagaacccgaattccacgccaccacccacgcttttctgccgagcgagacgacctcacaagggggggtttttttttggacgacgacaaggtccaaaatatccaaaaaacactggaaaatgaggactcatggcactacaacataacactttcaat

SEQ ID NO: 31241 - DNA, 126 bp, Zea mays; identical to SEQ ID NO: 31206
  Clone ID: LIB3181-010-P1-M1-C8

SEQ ID NO: 31242 - DNA, 291 bp, Zea mays
  Clone ID: LIB3181-010-P1-M1-C9
ttttttttcgttgcaaaacacaaaaggtgggcgtttcttttgattgcatatcacagacactataaggaagccctcataccggcataagatcctaaaatatcaatatattggggatgattaattaacatacatacatcacaaattattttttattcaaatcaatcattaagtgcggcctctcaacaaatccatgtgtacatttgcaaacatactaccatatacctcttcttattaaccaacccttatttaatttaacaaaaaagaacgtacgaatatttttcttctccttat

SEQ ID NO: 31243 - DNA, 298 bp, Zea mays
  Clone ID: LIB3181-010-P1-M1-D1
aatggattctggaagaggagcggaagatcaaaccacgcaacgccactgagaagaagaagatcgctgaggagaaagctcttctcaaggagataattcgggataagtctctccctcgtttgtgatggttacatcggctgaccttctgatcttgattttttctttctctccacctgcagtccattgaggacaacatctgaaactatgtgccctgttagttagcaaaaccattagcatttctttgcactatcacatctcttcatttgacaataagaaggtcgagttgttttgctctgatgag

SEQ ID NO: 31244 - DNA, 76 bp, Zea mays
  Clone ID: LIB3181-010-P1-M1-D11
tcgattagttgtcattcaataatgaagttttttggctgatgtatgtggcctcctagaaataagaagttatatttcc

SEQ ID NO: 31245 - DNA, 76 bp, Zea mays
  unsure at all n locations
  Clone ID: LIB3181-010-P1-M1-D12
tcgataagtcgacatncaataaggggggggggtggtttttgtatgcggccgcccataaataagaaggtatatttcc

SEQ ID NO: 31246 - DNA, 420 bp, Zea mays
  Clone ID: LIB3181-010-P1-M1-D4
tcgcagcaataatcaccacaaccaagcgtcgaaggacataatggatgtacacgatgacctggatgtgttccttcgtaccgagacccagggaaacaaatatttggctgtgagcattacaaaagaaactgcaagcttgttgctgcatgctgcaataagctattcacttgcagattctgtcacgataaagtaactcaataagtccacttattgactcttatgaccatgtaattggtgttaatacaactacattaacatgtaaaggttggtagatctggaaggtcttgatggtctaatacctatctatgagtacggaagaaaaggcgggagaagtcggtctctgcagcatcgcgcgtgaaaaaaaatcagccaattccacgagcattgatgttgtcatgacttcaaaagaggagagaccatgct

SEQ ID NO: 31247 - DNA, 293 bp, Zea mays
  Clone ID: LIB3181-010-P1-M1-D5
tcgctttaacaactactaccattcagccagctagctgttgtttgccctgctaccttcttgacacaaccacagttgttgccgttctaccagcacgttgcgcctaacgctggcaccctcttacaactgcaacaattgctgccattcaaccaacttgctttgacaaacccagcagtgttctaccaacaacccatcattggtggtgccctcttttagatttcttatgagttatagttcaataataaagttttttatctgatgtttgtggcttcccagaaataagaaagtacatttct

SEQ ID NO: 31248 - DNA, 410 bp, Zea mays
  unsure at all n locations
  Clone ID: LIB3181-010-P1-M1-E3
cctggaccttctggttcgacaacccgcagagcaagtccaagcaggccgcctgggggagctccatccgccccatacacaccttctccaccgtcgaggaattctgggggctttacaataacattaatcaccctagcaaattgatcgtgggagctgatttccattgcttcaagaacaagatcgagccaaaatgggaagaccctatttgtgcgaatggtggtaaatggaccatcagctgtggaagaggaaaatctgatacattttggctgcacactctgctggctatgattggtgaacaattcgactatggtgatgaaatttgtggcgcagttgtcagtgtgcgtgggaagcaagaaagaattgctatctggacaaaaaatgcttgccaatgaactgctcangtaagcatcggg

SEQ ID NO: 31249 - DNA, 310 bp, Zea mays
  Clone ID: LIB3181-010-P1-M1-E6
tcgcttatccctgcttctttgccatggcgagcagcgtcttgttatgcgagccctcctgctcaaaaaccacttaagggattttgcgaagaaccccgtggatgggttctccgccgggcttgtagacgacagcaacatcttcgagtggcaggtcaccatcatcggaccgcctgacaccctatatgatggaggctacttcaatgcaataatgaccttcccccagaactatcccaacagcccgccatcagtaagatttacttctgagatgtggcatccgaatgtttatcctgatggacgggtttgcatttctatt

SEQ ID NO: 31250 - DNA, 417 bp, Zea mays
  Clone ID: LIB3181-010-P1-M1-F12
tttcgcgttctttagcagggagcagcggctcgaggctgtgtgatattctgacgggttcgccatggggtccgagggatcctcgggtccagttgacgttcccagaaactttaggctgcttgaagaactataacgtggtgagaagggcattggtgatggaactgtgagctatggtatggacgatgctgatgacatatttatgctgtcctggacaggaactatcattggtcctcccaacactgttcacgagggacgaatctatcagttaaagctgttttgtgatacagattatccagataaaccaccgactgtccgatttcagactcggatcaatatgacatgtgttgaaccaagaaactggattggttgaaccaagtctatttcctatgcttggaaagtgtgaaagggaacatatgatgg

SEQ ID NO: 31251 - DNA, 374 bp, Zea mays
  Clone ID: LIB3181-010-P1-M1-F2
tcggtggcgcagaggcagaggcttgccagcctacctagctcgtcggggccctatggagatccagcaccaccgggggctgggcaactccaaggttgtcaaggtgcatagcgaggaggcgtgggatctgttcaccgatcaagcgagcaacgagggccggcccgttgttgcccatttcggggcgtcatggtgcgtgacgtccctgtccatgaactacaagtttgaggagctggcgcagacccaccccgaggtcttgttcctctacgtggacgtcgacgatgtccagagtgtttcatccaggtacggagtgaacgccatgccgacgttcttcctcatcaagagcaaggaggtggtggggaagatcgttggggcgaacc

SEQ ID NO: 31252 - DNA, 297 bp, Zea mays
  Clone ID: LIB3181-010-P1-M1-F3
gttagcacactaaagtaccaacgggggcaggggtaattttttgcctacttatgctcattataatttctgcaagtgctactacagcgaccattttcccgaaatgctcgcacgctgctatagcgtttccttattacaccgaacctctgaccagcgaagtttatgatatttgtaaacccaattctttaatcttccatgatccaataagctatcacatcttccattttacctttatcaccctcgttcttcaacaatattcaatcctattacatttaggacctttgggtcatttattgacac

SEQ ID NO: 31253 - DNA, 420 bp, Zea mays
  Clone ID: LIB3181-010-P1-M1-F4
atagaaagcacaatagtgtaccaacaatggcagccaaaatattttgcctccttatgctccttggtctttctgcaagtgctgctacggcgaccattttcccgaaatgctcgcaagctcctatagcttcccttcttcccccgtacctctcaccagcggtgtcttcggtatgtgaaaacccaattcttcaaccctacaggatccaacaggcaatcacagctggcatcttacctttatcacccttgttcctccaacaatcatcagccctattacatcagttacctttggtgcatttattggcacaaaacatcagggcacaacaactacaacaacttgtgctagcaaaccttgctgcctactctcagcaacagcagtttcttccattcaaccaactagctgcattgaactctgcttcttatttgc

SEQ ID NO: 31254 - DNA, 118 bp, Zea mays
  Clone ID: LIB3181-010-P1-M1-F5
tcgattttaaaggacaaaagagtgacacaacaggggacagtgcaaaatatttaagcgcaaacaaatgctcacaaaaaaagagcagcaagatgcagcaacggaaaccataaattcgaaa

SEQ ID NO: 31255 - DNA, 366 bp, Zea mays
  Clone ID: LIB3181-010-P1-M1-G1
gccgccctttttttttttttttgaacattgaagtgttttgtttgtatcagtctcagttcagctctcgattcttatcgactaaatattcatttataagatttcatggccccatacatgtaacagtgccgccaacaacaatattgattgataaatacaatgtgaggcgtcctctgttaggttacctgtggagttctggatatcctttccggtagcaaccaattacagatttacaattgatctagcaaagggctcccctctttggcaagaataaacaagcctccatcgcctctcgagatccttaagtctttgtccaggtaggtagtcaagagccaggatcgagctcttgtgttgccgggaattggtacc

SEQ ID NO: 31256 - DNA, 74 bp, Zea mays
  Clone ID: LIB3181-010-P1-M1-G10
aaaaataggaagatctcccgcagaccggccggaatcccgggcgacctagctttcgcataccaacacacacgggc

SEQ ID NO: 31257 - DNA, 229 bp, Zea mays
  Clone ID: LIB3181-010-P1-M1-G2
gtggatcgcctggtcaaggtccgtgtgctttttaaggtggatcgcgtgactggcagtgagtgttgctgcttgtgtaggacgcgttacgtacgggttttattttggttccaagtcaaaagtcacggtcggtctggatgttgtgtactgggtttgttgaattatgagcagctgcgcgttgtaattcggctgggctacctggatgcgttaataattgctttggtttctgccc

SEQ ID NO: 31258 - DNA, 334 bp, Zea mays
  Clone ID: LIB3181-010-P1-M1-G9
ccgaaccggaaggcccggaacgacccactcgttctaaaaaaaaaaaaaaaaaaaaacccaaagtttttttttaaaaaaaaccccccccccaaaaaaaaaaaaaaaaaaaaaaacaaaaaaaaaaaaaaaggcccgcccccccaaaaaaacccaagccaacaaacccggccatcccaccacaaacaccccccaaaacaccaccaaaaaacaaccccccaccccaccaaaacaacaacgaaacggcaaaaacaccacccctccccaacaaagccccacccaaaacacccccttacccccctcccaaaaaaccaaaaaggcccacacccaacccccc

SEQ ID NO: 31259 - DNA, 365 bp, Zea mays
  Clone ID: LIB3181-010-P1-M1-H2
tcgtggagatccggaagcgctcttcaaaggggacgcgtcgctatcagctaaagcttctcccctgcggactgggtcggaggatcctgtggcgccaaagcccaaggacgcggcctttgctagaggcaagccgtatgctgagccagcaacccataaacacggtgctaataccagctatgaaagaaaaaccggcacggagagatcgcctctgcatcctcaccaccaagcaaggctcgtaaacagaggaggtgtttcgtctccttcatgggaacgcacgggttcggcagaaggaaacccgggagctgcgcccaccacacctgggaggtctgccaagatgaggccaggcggccggggagacaagacgcctg

SEQ ID NO: 31260 - DNA, 179 bp, Zea mays
  unsure at all n locations
  Clone ID: LIB3181-010-P1-M1-H6
ttttgtacaacggtggcaacgccaccnacgngaaagccgcgcgcgaaatttttntgcaagngggcgaccgcgcgaacgacgcggngcgcgngaacggcgcggagctgcgctgcaagggcgncggcgaaggcggcaaccncggctgcacgcagntcggccgcatcgagttcgcgcagcgc

SEQ ID NO: 31261 - DNA, 406 bp, Zea mays
  Clone ID: LIB3181-010-P1-M1-H8
tcggttggtgaccttctctttggtcatggtggttattttgcgctttgtcatcaagttcttcctacttgaaatcgctgcctgggtgatgttcatcttcctagagacgtacacgagaatgttctggtcagcggaatcgctgtactataatccagcttggcacatcattgtttcttcctgggaaaccatcgtgtacagcccaattcttgatctggacagatgggccgtcccaattgtcataatgctattatttggggttctttactggagatgcttcggtggtagaaggaagcggggaaggggttcgctcctcccattgtacaagaattcttataactcgagtcgtcgctcgagatcagactagttatacacgcaatgttcaagtttttttcttttaaagaatggtaca

SEQ ID NO: 31262 - DNA, 250 bp, Zea mays
  Clone ID: LIB3181-011-P1-K2-A10
taacgaacgacctgactcatatgaccttgtttatcagcagggataatgtgggaaagtgcatgcccttttatcttgctcggggcatccttcaacatcaccccttctaggacctgtacctgatgctatttgtcattaccttattcatttccccaaaaaagaaatacaaaaccaaaaaaaaaaaagaaaaaatattaacgaaaactatattaatttttttttttttcttcattaatattccaccttatttttt

SEQ ID NO: 31263 - DNA, 427 bp, Zea mays
  Clone ID: LIB3181-011-P1-K2-A4
caacaagcaacatagaagagtggaatccagttgcatcatttgagcaccattggagaccaagatgttttccctccttatgctcctggctctttctacatgtgttgctaacgcgacaattttccctcaatgctcacaagctcctatagcttccctttttcccccataccttccatcaattatagcttcagtttgtgaaaacccaacttttcaaccatattggcttcaacaagcaatcgcagcaagcaacatacctttatcgcccttgttgtgtcaacaatcgccagccctatttttggtgcagtcattggttcaaaccataagggcacaacagctgcagaaactcttgctacccgtgatcaaccaagtagctttggcaaacctttttccctactctccgcaacaacaatttttttcattcaaccaactg

SEQ ID NO: 31264 - DNA, 462 bp, Zea mays
  Clone ID: LIB3181-011-P1-K2-A5
cggggccgacccaggcgtccgtcgcatggtaaaacgaccttttttaaccggtgtcctttaagtcacactaaaagaaggtgtggggacagtttgttagcttacgggcacagataactctagctggataaggagtaggaagttcaggcttggcttgaagcttgcctaaggattttgtgagggtgttcgcattcttgaagcaaaaacggaagcctccatggttaaggaccatataggagaatgtaagccccaaaaaattgttttggaatctcatattgacacatatttaaactattccagattcattgacccagggtacaagaagcactatccacctaaaaaaaatttataaataacatatatattttcatttaaatgtaattatccattatgcttatatatattatttttcttttatattctttcttttaaatgttttacaacttatcctcctttaatattttt

SEQ ID NO: 31265 - DNA, 200 bp, Zea mays
  Clone ID: LIB3181-011-P1-K2-A8
ggccggcccacgcttccgtgctgttcgccactttctcttctttctctcctatcccctcccgctaccacactagcagctggttttcttctaattatgggcatggccatttccaacagtttttccttattcttttcaattattttctttttattttactctttactttaattttttttattttattttctaatatttatatt

SEQ ID NO: 31266 - DNA, 421 bp, Zea mays
  Clone ID: LIB3181-011-P1-K2-B10
gcaaaggcatctgtggaatctgaagccaacattcctgatgacatttctgctgcgagtgtgggggatgatgcacaaagtgtatggcattctgctaaggtgctttggtgcaaatgaagaatagaaaaactaccatcccggtgtaaattgaagacagccaggtgctattgaagctattgaactctgttactgttccaacggcacaagacggataagaatgaaatcgctatatatgatggatttttggttggaagaacagagggatcaccaatcagaattctttctactatagcatatatttttcatgtacattgtgggtgcaagttcgatcaagggagcaaatcctgttgtatttttttagttagtgagattatgtgatgaaaaattggttagcgtcaaatttgcatttgcaaagtgactaatt

SEQ ID NO: 31267 - DNA, 75 bp, Zea mays
  Clone ID: LIB3181-011-P1-K2-B12
ttttctcacattgtttcggtggctggtgggcagtgtcttttttttcttttttttttttatcttttacattttttt

SEQ ID NO: 31268 - DNA, 223 bp, Zea mays
  Clone ID: LIB3181-011-P1-K2-B2
aaaaataaaattaacagaaattagatccaaatctctatgttcgcccgatctaaagaacccaacgttacgttcgcttacatacgagggtataccaatcctatatcgccaccaaaatcaaaaacactggccgtcatttaacaacacttttacttggaaaacccttgcttaacccaactaaaatccatggcaatacatccccctttctccagctttctaattacaa

SEQ ID NO: 31269 - DNA, 430 bp, Zea mays
  Clone ID: LIB3181-011-P1-K2-B3
cgggcgacccaggcgtccgtctatacattaatgcctccttgcaacaccttttttttttcaaccaactgactatttcaaacggggcggcttacttacaacagcggcagacatttacttaatccactatcagttgctaacccatttgccgctgccttcctacagcagcaacaattgctgccatacaaccagttctctttgataaaccctttcttgtccaggcaccaacccacctttggaggtcccatcttttaaattacatattaaacgtactccattatgttgccctaattccatcatgtttttcctagaaaaaatcaatatattgattgagatgtattccaatttatttctcaaaaaaaaaaaaaaaaaaggcttcccttttatagtatccatgcttacttaccctttcattctacatattaactttttc

SEQ ID NO: 31270 - DNA, 291 bp, Zea mays
  Clone ID: LIB3181-011-P1-K2-B6
tttatgatcttgctttacatttaggtttgttttcggtaatgatggattcacatactgtgggatttttacctgtctgggggctggaaaagtggcatgatatcatgcctgcaatataattagttaattcttagccatagttacagattgacagttttgcccattattagctcacatcattggaaagattttttagtaaacataattccatccatgatttggtgctcaaaaaaaaaaataatatataatatatttgtggtttccgttcttaaagatccatgctttctttccttt

SEQ ID NO: 31271 - DNA, 281 bp, Zea mays
  unsure at all n locations
  Clone ID: LIB3181-011-P1-K2-C1
aaagcggccagttcggggggctgatgccggctcacttagcccagcaactgacggcgatgtggggcgtgcagcatacaactacatgcccgtacgctgtttccgacggtgtcccccactgaagaaactatgtgccgcnaaataaccgctggctagctagctagttgagtcatttagcggcgatgattgagtaataatgtgccacgcatcaccatgggcggcagtgccagcgtgagcaatgacctgaatgaccaattgaaatgaaatgaaaaacgtattgttcc

SEQ ID NO: 31272 - DNA, 235 bp, Zea mays
  Clone ID: LIB3181-011-P1-K2-C11
ctacggagcacgtactaaaccgggggaaggccacttccactgcgggtgggaacaactaccttgatgacatcccacccgaccaaccacgactatttcctcgccgttactattcccaaacaagtctccaccggttcgtttgccaacaccgtccgtttccgtgctatgcaccgcctgctcaataggaaaagtcttccttacaacaaaatactgatcctattccatgtacctcattcag

SEQ ID NO: 31273 - DNA, 218 bp, Zea mays
  unsure at all n locations
  Clone ID: LIB3181-011-P1-K2-C3
atgcccattctcgagattcaacttttatttttttttccatgcgacttcacatttttccggtggggtatcttaaaaccaatgaagggccccnatttttacaccgtctttactagtaaatccatccttttccaaaacttaatacaatttcaatacatccccatttcatcttttatatcattatccaatagccatgttcctatcgcccatccaaacacttg

SEQ ID NO: 31274 - DNA, 357 bp, Zea mays
  Clone ID: LIB3181-011-P1-K2-C5
ggggccgacccacgcttccgatgactcttggctcctgccttcgccttctttttcaagcaacaacaaccacgtcgacagggggggttttttaactctgtgacgggcactaacaacggtttaaactcatccacgtaacataaaccttcctcaaaacctgtgcatagcttaacaccgcacctctaaaattttacactatccacctcacaattaaaatcccagtcataaagcgagaaaatcattataattccagccatatacatcaaacacaaactaaaaactaaatggcgtccaaagggtaacattttccaatccaaacaattacttcgcattccacaacattccaaatctaactcaccc

SEQ ID NO: 31275 - DNA, 328 bp, Zea mays
  unsure at all n locations
  Clone ID: LIB3181-011-P1-K2-C6
gacccacgcgtncgnccacgcgnccgaaaaaaaaatccaattaaatttaaacaaacaaacaaaaaaaaaaaagggaaggaaaaaaaaaaaaaaaggggggggccgccccaaaggacccacaccaccgaacccgggcaacccacgacatacaccaaacaatagggcccccaaaacacaacccactgcccccagcttaccaactaccgaacaggaaaacccctgccgccccccaaaaaaatcgcccagccaaaaagcccattggcacaagccgccgaaaaaccaaaaaggcccacaccaatccccctcccaacaaattacaacccctaaa

SEQ ID NO: 31276 - DNA, 414 bp, Zea mays
  Clone ID: LIB3181-011-P1-K2-C7
tgacctggctggatcccacctccgcgctcttttcggcggcgggtacatcatctacggggccgtgcttctttacaacttgcccggctccctcctctgccccagctactacaactgccgcccgggcggccaggccaacccctaccaccgcggctgttcccgcatcacccgttgccttggctgaggcggcgcctgatccgccagactgccaaggaaaggtctggtccaggtcccggccctttcgccgacaataatttctttcgccttgttcgttcaggcgctaccgccaccgccacctttgtttactattagcaccagacctacggattgaattgttgtatggatttttttggccaaatcttttttcttgttgaaagtaaggggagggattcctgccctttctcctgcttaaaatac

SEQ ID NO: 31277 - DNA, 423 bp, Zea mays
  Clone ID: LIB3181-011-P1-K2-D12
ttggcggcagcggcggcggggtagcatttgtgtctactagggcttttgcaatggcggcttcggggttcgtcgtcttcaatgcgttccggctctctcccataccagtatccttttaacttaagctgtacaagggctacatttaccttttgttctgtctacttctctattatactcctctattaatgttttttatttactaatttcagataattgttatttttattatatattttttcattatttttttttatttataatatttcattctatttattaatatatcttatattaatataaattttctaattttattattttatatttttaatttatctttcataatatttatttatttattattttttatattttatattattatataatttttctattataatcttattttttaattctatttta

SEQ ID NO: 31278 - DNA, 329 bp, Zea mays
  Clone ID: LIB3181-011-P1-K2-D2
taaaaaatattcctaaaccatacatcctgactttttttttatatcccacgtgtccaccttctagatgggctcctttatttccaatgtatggcccatctttttacaacctcactcctactaaaaccctgtgatttcctaaataaatcgctatcctaaaatatcctttttatccatcattccaatcttcctaatagtcctactcctatctcccttcccaacaacttcgcattcttaatctcaaatggtacgctccctttaactcatctttaaccacaccttctattttgtttactcttattttatccttcccactttttcattccataccc

SEQ ID NO: 31279 - DNA, 135 bp, Zea mays
  Clone ID: LIB3181-011-P1-K2-D3
ttcccgggccgaccagctcactatttgactccctttctattatatccaaccttatttttttctttcattctacgtcaaatcttttggggagtttcacctaaattcaaggcactgtccatcttcttacaacattta

SEQ ID NO: 31280 - DNA, 416 bp, Zea mays
  Clone ID: LIB3181-011-P1-K2-D6
tcgttggatttctttctttaggatctaaaataactctacggagtccagagttacagaccataggctttcatgtagccataagaaatggaggagccaaccacgttgcttcgtcttaattgacaatatgtccacacagtctccagatctgtaggctacaagtacattccggacagtctaggctctttattatggtaaaaacgaaatacgatctaccttcccaatcagttgaaccgatccgatgcgcgcgaaataatggcccaccaccggcgctttatcaggaggagctgtgacggacctaacaaggccacccggcgacactggttcatgaggagcaccctgtatttcctgttttttaattcgtttaccccaaaactgcagtggtttctgcggcaagtttaaaaaatccaagtttactt

SEQ ID NO: 31281 - DNA, 116 bp, Zea mays
  Clone ID: LIB3181-011-P1-K2-D8
gatttgccaacaaacaaaacactagttttctttttccttcgaagccctgccctgggggtgcggctttttctcaacctggggcattcaatccttcatctcccccaactcaattaact

SEQ ID NO: 31282 - DNA, 277 bp, Zea mays
  Clone ID: LIB3181-011-P1-K2-D9
aataaccgggccgacccacccttccttccactcttcctcctacccttccatcctattttttctattaaaaaaaaaataaattaaggggggatattttataaaaaaaagtaaggaaaatatattatcaaattaaaaaaaaatttactaaaaattaaaaaatataaatattatataattcctctctttttaaaattttaatttttattatctttatatatacctaactatttttcttttattcttaacccaaattataaattttaatccttttttttaa

SEQ ID NO: 31283 - DNA, 70 bp, Zea mays
  Clone ID: LIB3181-011-P1-K2-E7
atggctgtttacgttgtcgcttcatctttgtttatgctttacatttaaaaaaaaaaaaaaagaggggctt

SEQ ID NO: 31284 - DNA, 71 bp, Zea mays
  Clone ID: LIB3181-011-P1-K2-E8
taccactctaacttaatcaacatcaaatcttcatcttattcaaacccaaaacttcaagggggggaactttt

SEQ ID NO: 31285 - DNA, 228 bp, Zea mays
  Clone ID: LIB3181-011-P1-K2-F11
gcaagcctcgctacgtaccatttcaataaaatatatcttccgcaatggctagcatcaccatgggcgtgtctttaacggccttggggggcaagccctaaaacttgcctacttatacctccttcggctagtcccgcttgactattctcaaaactgcgtccaaggccaagccagtatcggcgtccggaagccctttgtaccgcccagaccgcttgctgtacctggtcccac

SEQ ID NO: 31286 - DNA, 362 bp, Zea mays
  Clone ID: LIB3181-011-P1-K2-F2
tttggtgcatgtcatgtggtacataaccatcaggggcacatgcagcgtgcagcaacctcgtgcttacctgtgatcaaccaagtagcttctggcaatacctttttccctactctcagcaacaacaatttcttccattcaaccaactgtctacattgaaccgtgctgcttatttgcagcaacaactattaccattcagccagctagctactgcctactctcagcaacaacaacttcttccatttaaccaattggccgcactgaaccccgctgcttatttgcagcagcaaatactactaccatttagccagctagctgcagcaagccgtgcttccttcttgacacagcaacagttgctgcctttt

SEQ ID NO: 31287 - DNA, 400 bp, Zea mays
  Clone ID: LIB3181-011-P1-K2-F6
ttcgtttgaagcttaccaaaccaggtttttcttttttcgtccccattatcatttagaagtattgcttatgtttactaggggggcgtcaaccattcccttttcgtaagcataacctattcgctggactttttcttatctcttttgaagaaggactcctacctgctttactatgccagttattccaccatatttgttaggtgtataactagttatcacttcggatcactttatcttattatatctgtctcctaccatgattttttcaattaatatgtttatcttccactgttatttctttttgtaggtttgggttatatctatttctctattttttttatttatcttatacttgagtcttttttattaattaatggattttctaactacatcttatattatt

SEQ ID NO: 31288 - DNA, 98 bp, Zea mays
  Clone ID: LIB3181-011-P1-K2-F9
gacactcacgtccactccttttacctttttttcttcttctcccctttaccctattacgacgggttcctttctaaatagtgctgggccttcaacaacca

SEQ ID NO: 31289 - DNA, 237 bp, Zea mays
  Clone ID: LIB3181-011-P1-K2-G1
ttcctttgtccaaagctcctatatggctcactttcttaaggtggtggccagggttccaaccaggagggtttacatgatcaagcagagggccatcaaacctgttgcggacatttacggtattgactccatagcagcggatctgaaggagaacaagatgaccatcataggcgagatggatgcattagcaattgccaagaagttaaagaataatgtaaagatggacatttgtgtcttttt

SEQ ID NO: 31290 - DNA, 227 bp, Zea mays
  Clone ID: LIB3181-011-P1-K2-G2
cctaaaagcccctacccattggcctttccaaccattttccccacctctaatttgcctattggacccccccctttttaccgccccttttaaaccccgcccgttttttgtttgtttcccccccattgtttccccttttccatttctaaagctccctttctcccccttttcttatcctttttttttcttttctttttttcccacatttttttccgtttttcccccgttta

SEQ ID NO: 31291 - DNA, 351 bp, Zea mays
  Clone ID: LIB3181-011-P1-K2-G4
aaatttttatattaaattatatacttataaattaataacaataaaataataaaataaaaaaaacaaaatatataataatataataaaataaatatgtaatataataaataaaataaataaaaaataataatataataaaataattaataaataaatatataataataaaaataaataaatataaaataataaataaataaattttaaatataaaaaattaattataaattaaaataaataatattaaaaataaacaaaatatttatcattaaataataataatataaatacaattaataattatataaattaaaaatataattattaatataaaataaatatataataatt

SEQ ID NO: 31292 - DNA, 317 bp, Zea mays
  unsure at all n locations
  Clone ID: LIB3181-011-P1-K2-G6
cggggccggcccacgcgtccgaggaacttccccgacaatggcatctttttttttttgagccacagcacgtacaactgggccgggtcgaaacggagcgcggggatgtgtgcctcttccgatncctggccgaaagaccccgcttcctataccatacacgttgcgtccgacgcttataacaccgcctttcttggggagtgtattgcatccatactgggacatgttccatactgttcatcccatggctgattaccattctgcgtctctgagcggttggtgtttgtcccatatatgtcatcaacaagcctggtatccataac

SEQ ID NO: 31293 - DNA, 450 bp, Zea mays
  unsure at all n locations
  Clone ID: LIB3181-011-P1-K2-H1
naaaaaaaaaaaaaaaaaaaaaaaaaaaaaaataaaaaaaaanaaaaaaaaaaaaaaaaaaaaaaaaaaaaaaaaaaaaaaaaaaaaaaaaaaaaaaaaaaaggggggggccgttttaaagaaccaaagtttacttcccctgcattccaagttaaaattttttttatggggcccccaaaataaaattaatggcccgtgttttaaaaacgtgggaacgggaaaaacccggggttacccaaattaaatgccttggaaaaaaatccccttttcccaagttgggttaaaacaaaaaggcccccaaccattcccctttcaaaaaatttgccaaccctaaatggaaatgggacccccccctttaccggccattaaaccccgggggttttggtttttccccccaatttaccctttaaatttgcaagccccttaacccccgttcttttgtttttttcc

SEQ ID NO: 31294 - DNA, 197 bp, Zea mays
  Clone ID: LIB3181-011-P1-K2-H10
tttctctttcatgcaacgtcatattttttttatagggttacctaaattcaattaattggccgtgtgttttacaactttcttactttttaaacctttgtttttccctaatttattgccttttatgacatactcttttttcatagttgcgtattatctataaaggtctttacttatttctatttcaaatattttttcat

SEQ ID NO: 31295 - DNA, 158 bp, Zea mays
  Clone ID: LIB3181-011-P1-K2-H4
tgttctcttagttttacctgtttcatttttctgttcctcatttcccgcttctttcattctcttttgtttcccttatttttattcgttatttctttctttttcttgttaagtttttttattttctgttccttgttttgtctttttctttattgtataat

SEQ ID NO: 31296 - DNA, 203 bp, Zea mays
  unsure at all n locations
  Clone ID: LIB3181-011-P1-K2-H5
gaannnggggccgacccacgcttccggcccttctccggccaccacttcaaatttttttatcttcacctcgtcaaggataagttcgaggggttcttcacattttgtcgcggcgcttccaaccaccacctccactatggtcaccacaaaagctactgttttcttttgttcaagaccattgtcgattatgacatttacaccttcac

SEQ ID NO: 31297 - DNA, 234 bp, Zea mays
  Clone ID: LIB3181-011-P1-K2-H9
tccactcttccgtaataaaaaaaaaatttttataattaaaaaaaacaaaaaaaaaaaggggggggtatattaataaaaaaaggggcggcctctctatattttccaatttactctttcctgttctttcaactcattttctcttttatagttacaccttatattaatttactggccaacatttaacaactttcgaacagaaaaaaccagggcgaaaccaaactttatatctctttt

SEQ ID NO: 31298 - DNA, 336 bp, Zea mays
  unsure at all n locations
  Clone ID: LIB3181-011-P1-M1-A2
ttacaatacaacctaaattcaattcacacacctacattttacaacttctanactaaaaaaactattcntaacccaacttaaccacctcgcaaaacataactctttaaccagattgcttaataaccaaaaaaaaaacaccaatcacactatcccaacactttctcatcctcaaattccaatactactctccctgtaccatcacattaaacgctcattaaaatatcaatacacccaccttaacacctacactttccatctccctatcgcccaattattatcctttcttcccttactttcttcccacattcaccaactttacccatcaaactctaaatt

SEQ ID NO: 31299 - DNA, 420 bp, Zea mays
  unsure at all n locations
  Clone ID: LIB3181-011-P1-M1-A4
tcgtaacaagcaacatagaaagtggaatcgaccggcttcaatagagcaacaatggagaccaagatattttccctccttatgctccttgctctttctacatgtgttgctaacgcgacaattttccctcaatgctcacaagctcctatagcttccctttttcccccataccttccatcaattatagcttcagtatgtgaaaacccagctcttcaaccatataggcttcaacaagcaatcgcagcaagcaacatacctttatcgcccttgttgtgtcaacaatcgccagccctatctttggtgcagtcattggtacaaaccatcagggcacaacagctgcagcaactcgtgctacctgtgatcaaccaagtagctctggcaaacctttctccctactctccgcaacaacaatttcttncattc

SEQ ID NO: 31300 - DNA, 320 bp, Zea mays
  unsure at all n locations
  Clone ID: LIB3181-011-P1-M1-B2
atacctttnatcaaccaantatctcttacaaacctttctccctactcttctcaacaacaatttcttccattttaccaactntctacactaaaccctactccttattttcattaacaactattaccatttatccatctacctacttcctactttcaacatctacaactttttttatttaaccaattaacctcacttaacccctcttcttattctccttcatatatactactaccatttatccatctatctacatctaactattctttcttttttcacaacaactattctttttcttctttcctaaattttatttttacttt

SEQ ID NO: 31301 - DNA, 166 bp, Zea mays
  Clone ID: LIB3181-011-P1-M1-B7
atattattctattatttttttttttttttattatctttcattttttttttttttttcttatttttattttctattatttttatttttttttttttatttttttatttctttatttacttattatttttatttttttttttttcttttcttttttatttattttttt

SEQ ID NO: 31302 - DNA, 288 bp, Zea mays
  Clone ID: LIB3181-011-P1-M1-C1
acattcgttagcgaccaggtcgcggggctcgtcccgccgcatatagcacagcgggtggctgctatttgcggcctgcagcaaccaactccatgcccctacgctgctgccggcggggtcccccactgaagaaactatgtgctgtaatatagccactggctagctagctagttgagtcatttagcggtgattattgaatcataatgtgtcacgcatcaccatggctggcactgacagagtgagcaatgacctgaatgaacaattgaaatgaaaagaagaaagcattggtcc

SEQ ID NO: 31303 - DNA, 280 bp, Zea mays
  unsure at all n locations
  Clone ID: LIB3181-011-P1-M1-C3
tatattatcacttaaattcaattcacttaccacctttttacaacttcttcacttttaaaaccctttctttacttatcttaatctccttacaaaacaaccccctttctccatctnacttaatatctaacaatcccacacctatctccctttccaacatttcctcaacctaaatttctaatcttactctccctctaacanctcattaagcccgcccgatgtcttaattactcacatccttacctttacactttccatcaccctaacaccctttcctttcact

SEQ ID NO: 31304 - DNA, 154 bp, Zea mays
  unsure at all n locations
  Clone ID: LIB3181-011-P1-M1-C5
tccatccaatacatcaaacacaaaanttatacttaatggcggccgaaggggtacatttgccaggccagacggctactttgcattccacaacgtgccagctggaactcatctgattgaggtctcctcaattggttacttcttttcccctggccga

SEQ ID NO: 31305 - DNA, 364 bp, Zea mays
  unsure at all n locations
  Clone ID: LIB3181-011-P1-M1-D12
tttggcggcagcggcngcngngtagcaccgcncctactagaacttttgcaaggggcacttcagngttcggcggcngctaggcgttccggctctcggccgcaccaggggccggcttactgaagctgcacaagggcgacatcaccctttggtctgtcgactgcgccaccgacgccatcgttaatgctgctaatgagcgaatgttaggtggcggaggtgttgatggagctatacatcaagctgctggaccagagctagtgcaagcatgccggaaagttccagaggtcaaaccaagaatttcgttgtcctactggagaaactaggattactccttctttttaacttacttccctttcggtgattcaca

SEQ ID NO: 31306 - DNA, 356 bp, Zea mays
  Clone ID: LIB3181-011-P1-M1-D4
cattatcccccctccccccccccctccaccccccccccttacccctttcttcttcccccccccccacaccccccccccccttccccttccccccccccccctctccacccccccccccccctcctcccccccccccctcctccctccccccccctcccccccccccatccctcctcccatctcccccctcccccccccccccccctcctctcatctccaccctaccccccccctcccccctcactccccctcctccccccctcccaccccccccttaccccccccccaccccccctcctccctccccttcccctccccccccccctcccctccccaccccccctccctcttccccc

SEQ ID NO: 31307 - DNA, 258 bp, Zea mays
  Clone ID: LIB3181-011-P1-M1-D7
attattatataatatttttttttatattatttttttttatttatttttatattttttttattattatttttttcttttattaattttattattattttttattttttttttttttatttttttttttttcctttattatttcatctttattttttatttttttatatattattttacttattattctttatttctttacattattttttattttatttttttttttattttttttttttctaattttttatttttttt

SEQ ID NO: 31308 - DNA, 388 bp, Zea mays
  Clone ID: LIB3181-011-P1-M1-F2
ttaaaacccagctcttcaaccctatcggctgcgacaagcaatcgcagcgggcaacatacctttatcacccttgtttcaacaatcgccagccctatctttggtgcagtcattggtacaaaccatcagggcacagcagctgcagcaactcgtgctacctgtgatcaaccaagtagctctggcaaacctttctccctactctcagcaacaacaatttcttccattcaaccaactgtctacattgaaccgtgctgcttatttgcagcaacaactattaccattcagccagctagctactgcctactctcagcaacaacaacttcttccatttaaccaattggccgcactgaaccccgcttcttatttgcagcagcaaatactactaccattt

SEQ ID NO: 31309 - DNA, 167 bp, Zea mays
  unsure at all n locations
  Clone ID: LIB3181-011-P1-M1-F8
aaaaaaaatttttttnttttttttttttaaaaaaaaaaaaaaaaaaataaaaaaaaaagggaaaaaaaaaaaaaataaaaataaaaaaaaaaaaataaaaacgattcaaaaaaaaaaaaaaaaaaaaaaaaaaaataaaaaaaaaaaaaaaaaaaagaaggggagag

SEQ ID NO: 31310 - DNA, 319 bp, Zea mays
  unsure at all n locations
  Clone ID: LIB3181-011-P1-M1-G5
aaaaanaaaaaaaaaanatcccggcctttttttatattcgcccctttaataatttttttttttttnnttttntttttttttttttttttctttttctttttttttctcacatttatttttttttttaattttaaaaaaaattctttttttttttttcatttttattttttcttttttttttttttttttttttttttctttttttctttttccttttttttttttttattattttcccccttccctccttttttttttttctttttatttatttatttttttacatttttttctttttcatttttttctttttttcttt

SEQ ID NO: 31311 - DNA, 81 bp, Zea mays
  unsure at all n locations
  Clone ID: LIB3181-011-P1-M1-G8
aaaaaaaaaaaaaaaaaaggggccgcgaaaaaaaaaaaaaggggggggaaaaaaaaaaattttntttttnnnttcttcatt

SEQ ID NO: 31312 - DNA, 434 bp, Zea mays
  unsure at all n locations
  Clone ID: LIB3181-011-P1-M1-H1
tctaaaaaaaaaaaaaaaaaaaaaaaaaccgcacggttttaaaaaaaaaaaaagacagaaaaaaaaaaaaaaaaaaaaaaaaaaaaaaaaaaaaaaaaaaaaaaaagggccccccccttttaaaaaaccaaacttaacttccccttccttccaacgtaaaaattttttaaaaggccccccaaaatcaaattaactcccccccttttaaaaacctcgaacctgaaaaaaccctgcctttaccaaactaaaaccctttcaaaaaaatccccttttccccacttgcctaaaaaccaaaaaaccccccaccaatcccccttccaaacaattccccaccctaaatgccaaatggaacccccccttaacccccccataaaaccccccggtttttgtgttacccccaanttaacccttaaattttcaaacccccaaacccc

SEQ ID NO: 31313 - DNA, 426 bp, Zea mays
  unsure at all n locations
  Clone ID: LIB3181-011-P1-M1-H3
aaaaaaaaatattttattaaatttaattaaatnaataattttatttaatttttttttattttttaaaaaataatcttatttttttttttaanaatttaataaaaaaaaaaaattttttttttattttcaataaaaataaatnaattaaaaaaaaaaatatttattttatattttttttatatttatcaaaaatacaaanaaaaaaaataacaaaaataagaaaaggaaatatttaaataatatttaatattatatatattataaatttttaatttatatataatataattaatatatataataaatactattattattatatatatatattattaatattttaataaattttaattattaataatattatatttattttataattatctttatatatatataattaatattatataaaatatatat

SEQ ID NO: 31314 - DNA, 236 bp, Zea mays
  Clone ID: LIB3181-011-P1-M1-H4
aaaaaaaaaaaaaataaatatcaaaaaaaaaaaaaaaaaaaaaaaaaaaaaaaaaaaaaaataaaaaaaaaaaaaaaaaaaaaaaaaaaaaaaaaaaaagagaagaaaagacaacaaaaatataaaaataaaaaaaaaaaaaaacaaaaaaaacaaaaaacaatacaaaaaaaaaaaaaataaacaaaaacaaaaaaaaaaaacaaataaaatcaacaaacaaaaacaataacaac

SEQ ID NO: 31315 - DNA, 243 bp, Zea mays
  Clone ID: LIB3181-011-P1-M1-H5
cctctatactatttttttttttttttttttttcataaataaaaatcccttttttttttttttcttttcttatttttattttcttctttttatcttcttattattatctttattttcttttttctttttcttttttatttctatttttaaatttatattctctccttccctctttttatttttatttttactttattattctttttcttatttattctcttttctttttcattattattattaa

SEQ ID NO: 31316 - DNA, 337 bp, Zea mays
  Clone ID: LIB3181-013-P1-K2-A1
ccggtcctagtcaaccttgggttgggccctccagcccatcctgcagaagaagccgaaaagcggccaggtcgcggggctgttggcggcccaaatagcgcagcaactgacggcgatgtgcggcctgcagcagccgactccatgcccctacgctgctgccggcggtgtcccccactgaagaaactatgtgctgtagtatagccgctggctagctagctagttgagtcatttagcggcgatgattgagtaataatgtgtcacgcatcaccatgggtggcagtgtcagtgtgagcaatgacctgaatgaacaattgaaatgaaaagaaaaaagttttgttcc

SEQ ID NO: 31317 - DNA, 351 bp, Zea mays
  unsure at all n locations
  Clone ID: LIB3181-013-P1-K2-A10
ccgtttcttttttatcccangnaaaagctncggggggccgtctcctgaatttcaactactttgagttgattctcgttggatttctcacgatgggagacagcgggaagcttgaggcaacgatagatcggcttctgaatgaagagaagcagatgagactcgccgaaaacgtagccggtacaaggaaagccgccactgagattcttcagctttgtttcgatgctaaggattggaaacttcttgaatgagcagattctcaatctctctaagaaacgtggtcagctaaaacaggctgggcattccatggtgcagcaggcattgcattatatcgatcagacaccagacattgaaact

SEQ ID NO: 31318 - DNA, 337 bp, Zea mays
  Clone ID: LIB3181-013-P1-K2-A2
ttttacctctaactcaatggggggtgtgaaaggttgctaactaatactggatggaccactctaacactagcagactaagcacacttgaactgatgctgggttatcttacttattctgtggaagctacaatcgaagtgcgagtcatttgcgggacatggccagctgatggttttcgtttcatctttgaggccaatgccggtataggacaatggattgtgttgcttgagactgcaaaaactgcaaatgttggtgataagatcagccttgcacggcaggttgtttctgttgactatcataaaaatagagagctgaaagttgtggccaccattacgaatgg

SEQ ID NO: 31319 - DNA, 212 bp, Zea mays
  Clone ID: LIB3181-013-P1-K2-A7
ccaccgaaaaaactttacgttgaaattggggggaaatggggtatagtctttatagataagactcttcaacgattccactttatttttctttgggatcgttgcccgatgaaaaaaaaaaaattctttgtaattacccgtccaaatatgtacaaaaaaaattgcgttcttgaaaccgcaaaaaactgcaaattttgtgataaaaacaaaccttt

SEQ ID NO: 31320 - DNA, 335 bp, Zea mays
  unsure at all n locations
  Clone ID: LIB3181-013-P1-K2-A9
agcaccaagggggggggagtttgaagacaggcagggatcaagaaaggaagnangagacngagcctnctcaagaagggactactttgatggctaacaagaatgctgagtaacagcggttgactggtatttataagaatatactgagcaaagctaatgtcaagttgattgaaggccgtggaaaggttatagacccacacactgttgatgtagatgggaaaatctatactacgaggaatattctgattgcagttggtggaacgcctttcattcctgacattccaagaaaagagttagctattgattctgatgccgcgcttgatttgcctcccaagcct

SEQ ID NO: 31321 - DNA, 106 bp, Zea mays
  unsure at all n locations
  Clone ID: LIB3181-013-P1-K2-B3
ccacgcgtncgccggaacacccccacaacccatgaccagaacattcctttccaggcggccctcgagaccccgggccgggacccatccaaccaccacccccacccaa

SEQ ID NO: 31322 - DNA, 426 bp, Zea mays
  Clone ID: LIB3181-013-P1-K2-C1
ggagattgcttggttggaaccctgttgaatttgttgtggaaaggccgcaaccatggaaaacctggctctgttttggagcatcatcggcccgggcgtgtccggtgccatcttcggggccggatggtggttctgggtggacgcggtcgtttgcagcgcggtccaggtctccttcctccactaccttccagggatcttcgcttcgctggcggcgctcatgttcaattgcgtgaacaaggatgagatcggatacgactattactcaccctacggggacgattcagagtggagagtgaagctctggctttttgtggcatatgtcgtttcttttggctgtttagctggatccgggggtttattggtgcaagatgcgctgacgaacaagggcccatctgtctggactgtgttgctggcgttctgcaatgtgtt

SEQ ID NO: 31323 - DNA, 458 bp, Zea mays
  unsure at all n locations
  Clone ID: LIB3181-013-P1-K2-C12
cgtccggcggatagaggaggaatatttttccctgagtgagtcacgcgcccgnggngactncgggcggggattcgtttttggacttggaggtggccaagaccgngatcgtggtccaagaggccgtggaagacgtggaggccgtgcctcggaagaaacgaaatgggttccagtgaccaaactaggtcgtctagtggctgacaataaaataacgaagctagagcagatctatcttcattctctcccagtaaaggagtaccaaatcatagatcatcttgttggtcctacgttgaaagacgaggttattaagatcatgcttgttcagaaacaaaccagagctggtcaaaggactagattcaaggcctttgttgttgttggtgatggaaatggtcatgtaggtttgggtgtcaagttgtctaaggaagttgctactgccattagaggagctattatttttgcta

SEQ ID NO: 31324 - DNA, 293 bp, Zea mays
  Clone ID: LIB3181-013-P1-K2-C3
caagcgtagtatatatcatccatgagcagcgttttccgttgtagataggtgcaagttttccagtgtgctagatgcatgtgcgcgtcaaggaggcagccagcccaatagcccatgcagggccaggaagcgaacaataataatgttggcaaagctgctagcgcatgttagagcgtgtgatgcatagtactatagtagtatgtggaataaagcatgcatcgtgagatagtagcaatgctgttatatataactgcgtttgtgaacaacaacaataatatatatatctgtgtttttat

SEQ ID NO: 31325 - DNA, 295 bp, Zea mays
  Clone ID: LIB3181-013-P1-K2-C5
gaaaaaaataaaaaaaaaaaaaaaaaaaaaaaaaaaaataaaaaaataaaaaaaataataaaaaaaaaatataaaaaaaaaaaataaaaggtaaataaaaaaaaaaaaaaaaataaaaaataaataaaaaaaaaaaaaaaaaaaaaataaataaaagaaaaataaataaaaaaattaaaaaaaataaaaaaaaaaaaaaaaaaaaaaaaataaaaaaataaaaaaataaaaaaaaaaaaaaaaaataaaaaaaaaataaaagaaaaattaaaaataaaaaataaataaaattaaa

SEQ ID NO: 31326 - DNA, 412 bp, Zea mays
  Clone ID: LIB3181-013-P1-K2-C7
ttttcatctagcccgttcgttgtgggctttgtttctctacgcacctacaacaacagtgggggcggcagattgtaccagctctgactcacctagctgtggcaaaccctactgcctacttgcaacagttgcttccattcaaccaactggctgtgtcgaactctgctgtgtacctacaacagcgacaacagttacttaatccactagcaggggctaacccattggtcgctaacttcctgcagcagcaacaattgctgccatacaaccagttctctttgatgaaccctgccttgcagcaacccatcgttggaggtgccatcttttagattacatatgagatgtactcaacaatggtgccctcataccggcatgtgtttcctagaaataatcaatatattgattgagatttatcttg

SEQ ID NO: 31327 - DNA, 411 bp, Zea mays
  unsure at all n locations
  Clone ID: LIB3181-013-P1-K2-C8
cgggccgacccaggcgnccgctactccaaaacgaaaaagttcacagagtgctttagaaagcaaccgncgcncnnancagggcgggaggactccancactagactagagagagaaacccnngnaccctnngntctgttaatcccccatttctccgagtcacccacccatcgccgaacttcgagtccaaggaagcggagccaccggagaaggggatatttgcctttcccgtcgggggtctagggagcaggagagatgcagcggcggcgggggcacacgtgggcgggggtggggaagacggcccaggcggcgtcggcgcacgccgcgctcttctgcttcactctcctcctcgcgctcagggtcgacggacgcaccacatactccgggtggataatattcattccactatggctc

SEQ ID NO: 31328 - DNA, 414 bp, Zea mays
  unsure at all n locations
  Clone ID: LIB3181-013-P1-K2-D1
cccacgcgtccgtnggaattaaaaacaacggcttttttttccttttgtctctgctttntaagcnaattctgcacgggggttttctttctctctacgactcccatcctaaaatatcaccaaattggacctttgaaactagtatttgatccattggtcttctgtggcaaggtatcctctgactcctttttttgtcatcgattcggtttgtatgaaatatatgtcaaggatttctaatcttcttattatcgaatcttaggatgcctatgcgtggtaaatcttctaaaccaagataaccattgtatatattgtattatcgaattagagcgtttaatgtttatgcggttcttagaacgaaacaacttgaattttaggaagggtccgttgatcgaaaatgccttcgacccgctgcctctg

SEQ ID NO: 31329 - DNA, 320 bp, Zea mays
  Clone ID: LIB3181-013-P1-K2-D12
caccaaaacacatgggcgccaccaaaaacacgaccatcatcatcctccccaccccagcgacacgtgccgcaccccaaaccagagcagatcatctggaaagcacaacagccccaggaagacgaaaactccaccgactcccgccatcaggctcaaacactactagacagcgccagagctgatgggaccaaaaaaaaaccagcggatgcccccaacggggaagctgcaaacgggcatggaaagccaaagaagaacacaaacttcttgccatacaagggagatgggtccaaagtacaagttccaacaaaacgaaacccaagcaa

SEQ ID NO: 31330 - DNA, 464 bp, Zea mays
  unsure at all n locations
  Clone ID: LIB3181-013-P1-K2-D2
ctcaataaccctaagctaaaccccatgccgcttgttacctcctccgccggcaggatggacagcctcaggggagccaagttgccggccgtcccaaagggcgggagtgccctcgtgaaggtggcgctgctcggcggcgcggggctctacgccgtcctcaacagcttctacaacgtcgagggcggacaccgcgccatcgtcttcaaccgcctcgaggggatcaaggacaaggtgtaccccgaaggaactcacctgatgatcccgtggatcgaaaggccgatcatntacgacgtccgcgcccgacccaacctngtngagagcacctccggaagccgcgacctccagatggtgagaattggtcttcgtgtccttactcgacccatgccagatcagctacctaaaatctacaggaacctgggggagaacttcaatgagagagttctgccttcaatcattcatgaaacact

SEQ ID NO: 31331 - DNA, 437 bp, Zea mays
  Clone ID: LIB3181-013-P1-K2-D3
gggggctgaggccaagccatgggcttggaagtttcttcggcggcggcggcgacggcggcatgtcggagtcggtgatccgcagggtcctggtctcgtacatgtacgtggcggtgtggatcttcctctccttctccgtgatcgtctacaacaagtacatcctggaccccaagatgtacaactggcccttccccatctccctgatcatggtgcacatggccttctgctcctccctcgccgtggcgctcgtccgcgtcctccgcgtcgtggacctcccttcctcgcccgccatgacgtcgcagctctacctctcctccgtggtgcccatcggcgccctctactcgctctctctttggttctccaactccgcgtacatctacctctccgtctccttcatccagatgctcaaggcgctgatgcccgtcgccgtctactccatc

SEQ ID NO: 31332 - DNA, 450 bp, Zea mays
  Clone ID: LIB3181-013-P1-K2-D4
gaacaattgttcggaaagttcttgtttatgattttttccccgctgagctggatttcagtaatggcagtgatttatccaagggcacatttagaaaagcaacatggaggggcattccggttgctgttaagaagctggacgatgatctaattgcggacggcagcaaagtgcaggcattcagagacgagcttgatgtgctgcaacttatacgtcatccaaatgttgtgcaatttttgggcgctgtgacacaaagcaatccaatgatgattgtcatggaatttatgcgcaagggtgacttgcgcactcacttgagtaagaaaggagctctgccaccatcatatgctgtgaagttagctcttgatattgcaagaggaatgaattacttgcatgagcataaacctcaggctatcatccatcgtgatcttgaaccttctaacatattgagggatgaca

SEQ ID NO: 31333 - DNA, 339 bp, Zea mays
  unsure at all n locations
  Clone ID: LIB3181-013-P1-K2-E10
tctcatccccaaccttaaacacctcttgtaaaccccccccaccnnannccaagggggggcgtgctaaaaaccaaatcaccccacccaaacaagacnaaaanncnccaaangggaaacccaaggccccaagcccgccccaagaacccgaaacacgccaacgacgagcaacaaacacaccnnccccgccaagctaacctgcacgagacaaaccacctcccacacctgtccctaaacaaacgcaagcccggaagccatcgacaccaccgccaccgcccattcagaacaacaaactaaaggctccaaggcctaaaccaacggacctcccagacagatcacacc

SEQ ID NO: 31334 - DNA, 316 bp, Zea mays
  Clone ID: LIB3181-013-P1-K2-E2
aaggggggggatatatcaataaattgttcgactccaaaataaccaaaaaaggctgaatccaaatttttgaagtccctgttaataacttttttggcagccaacaaaagctaaaaaagtgattactaattgagtaattgtagaatagacacctattcagatgtagttttagttttggtcgtcggtggtgagcctgtcattttgcaatgttatgtactgctagattcattattgtgtcgatttgaggtaataccttttgggctgtggaaaaaaaaaaaaaaagggcggcgttagagatcaagttactacctgcatgcac

SEQ ID NO: 31335 - DNA, 360 bp, Zea mays
  Clone ID: LIB3181-013-P1-K2-F11
cgccccaccgaacatatcgggaacgggtccctcacaaagcgacaccagaagctcaaccaagagcggcggcaaacgaggctccaataccatacaaccacaggtgggcgccctgagcctggagcacaccaagaagggacaccgcaaagacaagcccgacacccacatttggtgctgcccaccaacaccatggtgaccgcggagcatgcccctaacaccgtgcaaataatgctcgacaacaagggccaaacgccccacgacccaaaataatatataagcgagacgaccctgccttgtccatgccccagaccttcaaaaaaatatatataccggggctgaagtaatcgattgttctcttcaaat

SEQ ID NO: 31336 - DNA, 258 bp, Zea mays
  Clone ID: LIB3181-013-P1-K2-F12
tctctctgattccgtatcaaacatctctttgttctgttcggtgtctttgaatcaaaaagttcgaaacttgaataagtaatcaaattccggagctttctgtatataatcagcccaagacaattgatttacatacatattttctttgttgaaattgattggtgagatgattaggtgcaaaaagaaataggcttttaagctttttaccttgtctgaaactgaaactcttctgtctgaagcaaagtgaattgaataaacaaa

SEQ ID NO: 31337 - DNA, 135 bp, Zea mays
  Clone ID: LIB3181-013-P1-K2-F8
aaacgccaacacgcaacgccagaactctgctatagtgccacctaaatgcaatcaacaggccagggactaacaacgacttgactctaaaaacccagcctacacccaactgaatctccccgcagcacaccccccttt

SEQ ID NO: 31338 - DNA, 165 bp, Zea mays
  Clone ID: LIB3181-013-P1-K2-G12
ccccaaaccaaccgaggggggcatttttctaaacaaaccgcagcaatcaacaacaaccggcaaagcaaaacccatgaagcacacaaaaaccgaactccaagccaaaaaaacagcatcctccaccaaccgtggtggaggaaaggcaacgaaagacgctcgaaccgg

SEQ ID NO: 31339 - DNA, 338 bp, Zea mays
  Clone ID: LIB3181-013-P1-K2-G4
ttaccgcaaccattttccaacaatgctcacaagctcctatagcttccctttttcccccatacctctcaccagcggtgtcttcaatgtgtgaaaacccaattgttcaaccctacaggatccaacaggcaatcgcaacaggcatcttaccattatcacccttgttcctccaacaaccgtcagccctattacagcagttacctttggtccatttggtggcacaaaacatcagggcacaacaactacaacaacttgtgctagcaaaccttgctgcatactctcagcaacatcagtttcttccattcaaccaactggctgcattgaactctgctgcttatttg

SEQ ID NO: 31340 - DNA, 265 bp, Zea mays
  unsure at all n locations
  Clone ID: LIB3181-013-P1-K2-G8
cctgnggtttaaatcacctatacgcaatgaganacggaaccattccagttgttcatggcactggaggactcagaaatacgtttgaaaaattcaacccttatgcagatggtgtagctggtactggaacatggtgggtcttcactcccttgtcgaaagaaaacaaggtctcgtccttgatgttggctgcatcaacttacaaagagtattaacagtcatggtaaggattgatgaaaaaagtaatgaccctaaactactcttgggaaaa

SEQ ID NO: 31341 - DNA, 262 bp, Zea mays
  unsure at all n locations
  Clone ID: LIB3181-013-P1-K2-H12
gccccanaagcgggggggggcatcagtgataaagtgcgggagggccaaaaannggctcgatcccaacgaaagctccgacatctccatggccaattcccgccaaaacatcaggaagctggggaaggacggtttcatcatcaggaagccaaccaagatccactctcgttccagagctcgcaaaatgaagattgccaagatgaagggtcgtcactctggaaacgggaagaggaagggtacccgtgaagctaggttgccaacaaag

SEQ ID NO: 31342 - DNA, 476 bp, Zea mays
  unsure at all n locations
  Clone ID: LIB3181-013-P1-K2-H2
tttgtttcacgcgntccgaactagcaacataaaaaggctcattggggtctttattttggcagccaaaatattttgcctccggaggctccttggtatttctgcaagtgctgctacggcgaccattttcccgcaatgctcacaagctcctatagcttcccttcttcccccgtacctctcaccagcggtgtcttcggtatgtgaaaacccaattcttcaaccctacaggatccaacaggcaatcgcagctggcatcttacctttatcaccctngttcctccaacaatcatcagccctattacagcagttacctttggtgcatttattggcacaaaacatnagggcacaacaactacaacaacttgtgctagcaaaccttgctgcctactctcagcaacagcagtttcttccattcaaccaactagctgcattgaactctgcttcttatttgcaacaacaacaactaccattcagccagc

SEQ ID NO: 31343 - DNA, 245 bp, Zea mays
  unsure at all n locations
  Clone ID: LIB3181-013-P1-K2-H8
caccaaagcaccccanggaagagggggtgaagaagacggaggcgcctacccaagaaaggaagctagagacagacgtggagatcaaggcttcggctgataagtttcaccacatgtccgctgggaaaccacaccatgtctccaaagcaagtccaggcaacattcagggatgtgacctgcacgaaggcgactggggcacagtcggctctatcgtcttctggaattacgtacatgatggggaggcaaag

SEQ ID NO: 31344 - DNA, 118 bp, Zea mays
  unsure at all n locations
  Clone ID: LIB3181-013-P1-K2-H9
gaaaaataaaaaaaatttaattttcctgagtaaataccaaacaaaaaaaaaaaaaaaaaaaagaatttttttaaaaaaaaggggcggcccacacaaanccccccnnnngnnnccggga

SEQ ID NO: 31345 - DNA, 105 bp, Zea mays
  Clone ID: LIB3181-014-P1-K2-A1
catcattggcggtgccctcttttagattgcttattagttgccatccaataatgaactttttgggctgatgtatgtggcctcctagaaataaaaagttatatttcc

SEQ ID NO: 31346 - DNA, 301 bp, Zea mays
  Clone ID: LIB3181-014-P1-K2-A10
gaacgaacgacctgccccatatgacctttgtttccagcagggatgatgtgggaaagtgcatggccttttattttgctcaggggatcctccaacatgaccccttcaaggtcctggaccaaaggggagtggccgacctgttaaattttgctacagaaaggggcctcaatgctagccctaacttgaaggtggccatttgtggaaaacacggtggaaagccttcctctgtggccttcttcacaaaggctgggctgaattacttatcttgcccccctttcagggttcctattgctaggctaacttc

SEQ ID NO: 31347 - DNA, 298 bp, Zea mays
  Clone ID: LIB3181-014-P1-K2-A12
atggatcccttgactagctacctaccttgcttttttactaatttaccgtcaatcaggggggtattgtaacccataaccaggggtgccagttttagcatttacctgattgaaccttcgaaatggaaaggaatactatattaggaaaaaagatgcttggtacaataattactaaaaaacacaaaaaacaattagattaataaaaaaccaataaaaacttgagaagctcaaagcatgaaaaaaaatgtaggcatgattgggggccgggcctttttagaggaccaatttttcttacccttaa

SEQ ID NO: 31348 - DNA, 309 bp, Zea mays
  Clone ID: LIB3181-014-P1-K2-A4
agcagatcaaacaagtagcgtcagctcgacatttatttgtgagagtgatccggcccttagaggagatggttaaaatcgccgcagccgaccaggcggtggtctgtctatgctcagaggccctggtggccgcggccttttgccaaggcgaggtcgagcggcacaggctcagggacctgcattgcttgcaggaggtccaggaaagcccgctcgacgcgtgcttccaggtccttgaccggcaaataaccggcggcggcgtcgtcagaccgttccggtgggacaccggtctccggatgcggtgctgccagcagt

SEQ ID NO: 31349 - DNA, 387 bp, Zea mays
  Clone ID: LIB3181-014-P1-K2-A5
gcgcgagggaaaacgacctattttaaccggcgttctacaagtcacactaaaagaaggtgtcgggacaattggggagcttacgtgcacagataactctagctggataaggagtaggaagttcaggcttggcttgaagcttgcctcaggattttgtgagggtgttcgcattcgtgaagcaaaaacggaagccttcatggttaaggaccatagaggagaatgtaagtcccaaaaaattgtttttgtatttctattgacacatatctaaactattccagattcatttatctagtgtacaagaagcactatccacctaaaaaaaaataaataaataaaaaaaattaatttttttaattttataataattaattttattatattttttttttt

SEQ ID NO: 31350 - DNA, 329 bp, Zea mays
  Clone ID: LIB3181-014-P1-K2-A6
acccacgcttacaaatctgttccctcctgacttatccaaaccctttcttccctttggtccccgatatagctaaagtgtgctttataaaccggcacgaggtccataacacctctagaaccttaacccacagttatgccatgtattatttactctacctgtcctttggggtctctatctccattttttgcccgaacctgtacatcccacaatgtattctttctatccttcctgtataacgattaacctaatttgttttgcaaaacatttcccccttttggtgctgaatactgctaaattgcctaactattaacctataattcttattaatt

SEQ ID NO: 31351 - DNA, 295 bp, Zea mays
  unsure at all n locations
  Clone ID: LIB3181-014-P1-K2-A7
caagcgtccgggcgggcgccgtgatggcggcggctgttacttttgtggcggcggctacggtgccgggggcggctactttaatggagggggcgggtacnacnttggcaaccttggcggcggctacggcaactccgacgggaactggaggaactgagcggtggggccccgcccggccaatttatcctgttcgctgccgtgatgtttaccctagtccagagggtttatcttcgttcgtctcgtgtttgttgttgcccatctgtgtttttgattgcaaggtcgctctgggtcagttgtt

SEQ ID NO: 31352 - DNA, 226 bp, Zea mays
  Clone ID: LIB3181-014-P1-K2-A8
cgctggtcgccactgccgcttcttcctttcccttcccctcccgctaccacacaagcagcttcgtgccgccgcagcgtacgcatggcctcgtcggacggctctgccgcggccctgcccagcgctaccgtcgatgtgcccggcgccggggcccctgtcctcgtcgtgggcgcgccggggctccccgaggctgacttcaggaacgcggtggagtcgtcgctgttcaagc

SEQ ID NO: 31353 - DNA, 218 bp, Zea mays
  Clone ID: LIB3181-014-P1-K2-A9
ggctgtgttacagctcacccctcaactgtgctttgttttgttggcttgctttgtggggggggctgcatctatatgccgcttgttcttgttaattcgataaatgtactgagcgacttgccggtcaccctgcctgcctttttctccaccatcgtttctgataatttaaggaactctgtggcaaacaggctatggctgttgactactgacatctatacttg

SEQ ID NO: 31354 - DNA, 130 bp, Zea mays
  unsure at all n locations
  Clone ID: LIB3181-014-P1-K2-B1
catcattggcggtgccctcttttaaattgcttattatttgccattcaataataaantttttggcctgttttatatttcctccgagagaaaaaaanttatattttccaaaaacaaaaaaaaaagggcggcc

SEQ ID NO: 31355 - DNA, 286 bp, Zea mays
  unsure at all n locations
  Clone ID: LIB3181-014-P1-K2-B10
gcaaaggcatctgtggaatctgaagccaacatacctgatgacatttctgctgcgagtgtggcagatgatgcacaaagggtatggcattctgctaaggtgctttggtgcaaatgaagaatagaaaaactaccatcccggtgtaaattgaagacagccaggtgctattgaagctattgaactctgttactgttccaacggcacaagacggttaagaatgaaatngntatatatgatggatttttggttggaagaacagagggatcaccaatcagaattctttctacta

SEQ ID NO: 31356 - DNA, 408 bp, Zea mays
  unsure at all n locations
  Clone ID: LIB3181-014-P1-K2-B11
tcaaaggcatctgtggaatctcaagcctactttcctgatgacatttctnctncaagggtgcgagtttttccacaaagggtagggcattctcctaaggtcctttggtgcaaattaagaatagaaaaactaccatcccggtttaaattgaagacagtcaggtcctattgaagctattgaactctgttactgttccaacggcacaagacggataagaatgaaatcgctatatataatggatttttggttggaagaacagagggatcaccaatcagaattctttctactatagcatatatttttaatgtacattgtgggtgcaagttctatcaagggagcaaatttctgttgtattttttttagtagtcgagaatatttttataaaaaattggatatcacctaattttcaat

SEQ ID NO: 31357 - DNA, 225 bp, Zea mays
  Clone ID: LIB3181-014-P1-K2-B12
gataagagcaatgctttacatttgggctagttttcggtaatgatggattcacatacggtgggatattgacctgtctggaggctggaaaagtggcatgatatcatgcctgcaatatcattagtttatttttagccatagtttcagattgacagcattgcccataattagctcacatcaaaggtaagaatttgtagtaaacatcattccatccatgatttggtgctc

SEQ ID NO: 31358 - DNA, 332 bp, Zea mays
  Clone ID: LIB3181-014-P1-K2-B3
gggaaacattaatgccttcttgcaacagctgtttccattcaaccaactgactatgtcgaactgtggtgcgtacctacaacagggacaacagttacttaatccactagcaggggctaacccattggtcgctgccttcctacagcagcaacaattgctgccatacaaccagttctctttgataaaccctgtcttgtcgaggcagcaacccatcgttggaggtgccatcttttagattacatatgagatgtactcgataatggtgccctcattccggcatgtgtttcctagaaataatcaatatatggatggagatttatctcaatatatttctg

SEQ ID NO: 31359 - DNA, 355 bp, Zea mays
  unsure at all n locations
  Clone ID: LIB3181-014-P1-K2-B5
cggaatnccgggccggccgcaggcgtcctcatctagcgagagcaaggctcccaatcaacctctgttagaacaagtcgcagccaaacagccgcgggggccanctaagcttgaggtgggattattctaccatgtcttccatggagctgctccacgccgtcgtcccggataagcatagcgaggaggaggtcgcgcccgcatctactaccactagcagcatcgccaccgccacgggcggggactagggcgcccacttgccccaggggtgggccaagagaaagcgctcgcgccgccagcgatcggaggaggagaaccttgcgctctgcctccttatgctctcccgcggtggccaccaccg

SEQ ID NO: 31360 - DNA, 249 bp, Zea mays
  Clone ID: LIB3181-014-P1-K2-B7
ttcttttttccccttcatatcttttttttacggcggctttatatataaattcacgggccgccttttttctcctttttctcttttaaaaccctttctctacccaacttaatcacctcccataacatccccttatctccatctttttttttttctataaatcccaaaccaatctccctttccaactatttctcatcctttatttcaaatttttccctccctttttcttcccattaaatttcttattttttt

SEQ ID NO: 31361 - DNA, 303 bp, Zea mays
  unsure at all n locations
  Clone ID: LIB3181-014-P1-K2-B9
ccgggccggcccacacttccaccaaggactccctgtccctctncttcttttttttctccccccccccacccacnacccggcgttttttataactatctggcccgccccacccctcctcctcctccttccctctatccaaaccccccttcccctttccattcccatcacccaattccacactccccttttttttttttaaccctttcacttataacccatcctccctatctcttcacttaccctccccctaattccatctttaactccccctttatcatccccttaaacccctcctttttttcc

SEQ ID NO: 31362 - DNA, 105 bp, Zea mays
  Clone ID: LIB3181-014-P1-K2-C10
ccacccggcgaaggcctatcaaaaatctcaaacttactatctcatgccagcaacgttatatggggggcattttttacacaaaggggaggtcattctcctaagttt

SEQ ID NO: 31363 - DNA, 301 bp, Zea mays
  Clone ID: LIB3181-014-P1-K2-C11
cgaggagggtctggaaccttcactgctattttaacgtacacataagtgggcggatggttcgattcattctaccaaatgaccctttcaaaaaaaggtgcataattgtcctttgcagaaaaagaatggggaaacctaggcttgttctcatatcaccactttaatcttatttaaccatcctttatgttttgttccagttataaacgtttaaataatataatgttgtttatataggtggaattttcctataaaaaaaagaatcttttttaaaaaaaaatattattaaaaaaattaaaaagggcgg

SEQ ID NO: 31364 - DNA, 92 bp, Zea mays
  Clone ID: LIB3181-014-P1-K2-C12
aactcattcgtccacgcgtcctataaaaaataaaaatcttatttacacatacatacaaaaaaaataagggtagtataataaaaaaataaagg

SEQ ID NO: 31365 - DNA, 252 bp, Zea mays
  Clone ID: LIB3181-014-P1-K2-C4
cctcgctgctctgtacccccatgatgaacaaaaactcctcgttttcagttgatgtgtgtgtgtgtgtgtatctcagccagcgtctgtctacttcgctcgctcgctgtgtggggttttgctgcttgaggtggcggtggtcttggccatgcgcctacttataagctgcaaagttttgtcacggcgcagggcgtccccttgtggtcgtctggcaagttgcgcctttttttttattatttatatttttcccccccc

SEQ ID NO: 31366 - DNA, 161 bp, Zea mays
  Clone ID: LIB3181-014-P1-K2-C5
cccaccctttccccctttcctcctaacccatttacaatccaattccagacccctagcccggggggacctttacatctaagcgggagttactacttacacctactgaacctactccaacctatctttcccttaaaacaagctgacatctacccaaattatca

SEQ ID NO: 31367 - DNA, 364 bp, Zea mays
  Clone ID: LIB3181-014-P1-K2-C6
ccaaggcagagctctcacgcggacggcggacctggccacctggggggcgcggacggagcctgcgctttcccccctcccctccgtttcgaacgactaccgaggaggcatccgaggtggccagccacgatgatggccgcggcggccctgaggccgaacaagtcttcgccggcgcgggtgcccacgcggtgcgtggccgggctctgcgccgcctgcttcctagtcggcgtcggcgtcgtcaacaggtactggcctgttcctgagcctcatcccggttgccccgacaaggctggccctgaccactcgagggccgtgttgaaccaagcgtcacagactcgcgaagtcgtcatggcgttggacaagacga

SEQ ID NO: 31368 - DNA, 417 bp, Zea mays
  unsure at all n locations
  Clone ID: LIB3181-014-P1-K2-C7
tgacctggctggatcccaccgccgtgtctctttacggcggcgggtacatcanctacggggcgctgttgttgtacaacgggccgtgctccctcctcggcgccagctactacaactgccgcccgggcggccaggccaacccctaccaccgcggttgttcccgcataacccgttgccgcggctgaggcggcgccggatccgccagactgccgaggaaaggtctggtccaggtcccggccctttcgccgacaataatttctttcgccttgttcgttcaggcgctaccgccaccgccaccgttgtttactatagcaccagacctacggattgaattgttgtatggatttgtttggccaaatctttgttctgttgtaaaagaaggggagggattcctgcccctgcgcctgcttaaaatactta

SEQ ID NO: 31369 - DNA, 74 bp, Zea mays
  unsure at all n locations
  Clone ID: LIB3181-014-P1-K2-D10
ggaaaaccgggccgaccaactcactactccctggnccgcctataacaaccaattttttttacccaaccccaccc

SEQ ID NO: 31370 - DNA, 319 bp, Zea mays
  unsure at all n locations
  Clone ID: LIB3181-014-P1-K2-D11
ccggnncgagaaaaccgggccgaccagctcattagtttgcaacacgcatataggttccaactttatttccccgtgcatgctagataataactggtgggtagtgtcacacaatgtaaaggcactgcccaacattttacaacactgctactgggaaaacacaggggttaccaaacttattcgagttactgaaataaatgtttcacagcaggccaatatctaatatgaccccacctgagcgcccttgccaaaagtaaaccatcctgaatggctaataaaacaccccctcttgctctaacttaagcgcatctaatgtggtgtt

SEQ ID NO: 31371 - DNA, 209 bp, Zea mays
  unsure at all n locations
  Clone ID: LIB3181-014-P1-K2-D2
gaatnnngggccgacccatcttccgtaaaaaatatccccaaaccctatctcccgatttttttttcaaaccctctcttctttttcaagatgacttttttataaaccccgacgggccaaatctttttnnatctttaccccacacaattttcccaaaaccgcctaaaacttcctctctctttgcactaactataaatttttttcaattcctt

SEQ ID NO: 31372 - DNA, 323 bp, Zea mays
  unsure at all n locations
  Clone ID: LIB3181-014-P1-K2-D3
ttcacactaactcttgtgtgccttcatccactncaattattttccaacggcttaataactaccaaagagcgtttaatttaaatacgcgcccgttcccaaaaccatacccantcatatttataaaactttacaaactagttctacttcttttcattttaaccaacctttaactttttttcctcacccttatcaattaaacaatctaattcattccctaatataataaaactttaaccacttccatctcactaatttcctaaatttaaataacaatttcaatctatatctcaattttctaacctatttctcattccatttaatcc

SEQ ID NO: 31373 - DNA, 334 bp, Zea mays
  unsure at all n locations
  Clone ID: LIB3181-014-P1-K2-D5
cggaanacccggccgacccacgcgtacagaaaggcttcttccataacttccncancatttttattaacgtcaaccccatctacttcaaagtcacgcttttttctactttaggctagtcacacttnacttacncctcactccccaatccttatccaaattaaagaacttcttcttctattaattacattatattgtaatttgtcttctaatacgtcgttaccattattttaatatttcataataaccctcttttattttttataataatatatatcttttaactaaaaatatatatttacttgtccttccctcctataaattattccaatttttt

SEQ ID NO: 31374 - DNA, 442 bp, Zea mays
  Clone ID: LIB3181-014-P1-K2-D8
caactggcaacatagaaagcacaatagtgttccaacaatggcagccaaaatatttggcgtcgttatgctccttggtcggggggcaagagctgctacggcgaccattttcccgaaatgctcgcaagctcctatagcttcccttcttcccccgtacctctaaccagcggtgtcttcggtatgtgaaaacccaattcttcaaccctacaggatccaacaggcaatcacagctggcattttacctttatcacccttgttcctccaacaatcatcagccctattacatcagttacctttggtgcatttattggcacaaaacatcagggcacaacaactacaacaacttgtgctagcaaaccttgctgcctactctcagcaacagcagttgcttccattcaaccaactagctgcattgaactctgctttttatttgcaacaacaacaa

SEQ ID NO: 31375 - DNA, 302 bp, Zea mays
  unsure at all n locations
  Clone ID: LIB3181-014-P1-K2-D9
ccatcacncccacgcnncccgcccaaaacttccaactttttcttccccaaacatacaaacantataaccagccaattttttaacacaaatcgcaagccactaaacctnccctttacaactaaaataactataaaaaccctatctatacccaacattttccccctccaaaacattcccattttacccaccttcacaaaaacaaaataacccctcaccaatcccccccccaaacaatttcccttcctttatttaaaatattactcccctcttaaccccccaattatccccactttaattctctt

SEQ ID NO: 31376 - DNA, 351 bp, Zea mays
  Clone ID: LIB3181-014-P1-K2-E1
accgaatcaagtcagattcagggaggggaattcttaaccctaacctctctcactccgccggggccggtttatctcgaggaggacccttcatctacccgccgcactaacaaagctcccatggccaacctcggcggtggcgccgaggcgcactcccgattcaagcagtacgagtttcgcgccaactccagcctcgtcctcaccacagactcccgcccgcgcgatacccacgagcccaccggagagcccgagacgctctggggcaggatcgaccccaggtccttcggcgaccgcgccgtccaaaacaggccgcccgagctcgaggagaacctcttcaagtcgcgcaccaaaaag

SEQ ID NO: 31377 - DNA, 279 bp, Zea mays
  unsure at all n locations
  Clone ID: LIB3181-014-P1-K2-E10
gaannccggggccgacccactcttcctctgacccgtgtccccaaatttcaccattaattctcatcaagaggccgccnacaggggagggagggtctttttcttttagggggagccacctcctcctaatcctcgcagccgccgtcctgctctccttgctcgcggttgccagccccagctccgggacctcctgcttgccgttgtgggccatcccgtacaacccgttcccaagctgccgtttgtacatgaccagcctaacctgcttgatttttccgcgccttc

SEQ ID NO: 31378 - DNA, 325 bp, Zea mays
  Clone ID: LIB3181-014-P1-K2-E11
cccaaggacgccttcgacgatcacaatttcttttcctaaggtcgcaacgtgttcgtgtgcccgtgttctttctgtccgggcggggctttgccccccgatcaaaaccgttgcgtcggcgaaaacgtgcttctggctcactttaattttaccaagtttgtttcaaggtggatcgcgtggtcaaggtccgagtgctttaaaaaccaaccggcactggaacagagtgttactctttatgtagactttgatacgcattggctttattcacttttggatgttgtgtactacttacttttattgaataattatgaccagccacctatttaaa

SEQ ID NO: 31379 - DNA, 221 bp, Zea mays
  Clone ID: LIB3181-014-P1-K2-E3
cgccctcttttagatttcttatgagttatagttcaataataaagttttttatctaatgttggtcgcttcccataaataagaagcggcattcctaaaaaaaaaaaaaaaaaaaaaaaaaaaaaaaaaaattttaaaaaaaaaaatataaaaggccggcctctaaaaaaaattacaacttaacttacactttcatccaacgttataaatttttttttagtatt

SEQ ID NO: 31380 - DNA, 283 bp, Zea mays
  Clone ID: LIB3181-014-P1-K2-E4
cctcatttgctcaaacctccattattacacatttcttcccaccaattactaaaatggccggggagcacccaactctgcaagcgggtgggctccaacaaccaatcccggccaccctcttacaacaaccaatttcctacttgcaacaacaatccttggcacatttaacaatacaacaccatggaactcaccaccaacaccaattcctaccacaactaacccacctagccatggttaaccctcccgtctactttcatcagcactcgcttgtataaaacccacttgc

SEQ ID NO: 31381 - DNA, 411 bp, Zea mays
  unsure at all n locations
  Clone ID: LIB3181-014-P1-K2-E5
ttccactctaccgcgcgctcggaaaactcctctttcttctaaggaggtgaaccaaggacgaggtatgtgtctcctgataaggggggggtctttccncctnttcctacaattcttttgtcttgctccaggcggctatgcattcattgtagttcgtcctcgcggatcctccttcatttctttctgttcccacccaaaattaaaatccttttgtaaattagagacgcgaatccttgtccctaagccccaaaacctcctatttctttcgccaattttttccgcctaactctttccttccttccaccggtcggccttgactgatccttctcacttgttttttcttagtttcgaattttccttttgcttacaaattcctatataacactaattcctgttctttccacttttaatttt

SEQ ID NO: 31382 - DNA, 399 bp, Zea mays
  Clone ID: LIB3181-014-P1-K2-E6
gtcttgaaaggggagagagagagagagaatattgtgttaagagagagagagagagaggagtgggagaccctctagaggctgcggggtagggaccgtaaactcagcgactgcaaaggagggataaggggatggccggaatcggaccgatcaggcaggactgggagccggtcgttgtgcggaagaaggcacccaccgccgccgccaataaggatgagaaggccgtaaacgccgcgcgccgtgccgttgcggagatcgataccatgaagaattacaacgctgttacgaacaaggcggcatccatcggtacatccttaaacaccaagcgccttgacaactacaccgaaaacctctcccatgagcgagttccaaatgatctgaaaaagaatttcatgcaagcaa

SEQ ID NO: 31383 - DNA, 380 bp, Zea mays
  Clone ID: LIB3181-014-P1-K2-E8
ataccattaatttactctacagcgcagagcatctccaaccgacaccatacggtgggggtggggttccttgcctttcctggcttgggtttcgagcgcaacctcaactcatacaatacaagggtggggttggcatccaccccaccgggttcatttaatgtaccgggtgcatttcatacgtcaggttcacttgacatgtcaggtgcatttcataccgcaggtccagttgacgtggcgggtccagttgacatggcaggtccatgtgatgtgccgggttcatttgatgtggcgaccatgccattacactactcaactgaaccggcctgagcttaatcctaagccaaaccaatgccattgccaacagaacaatccaatccaatccc

SEQ ID NO: 31384 - DNA, 367 bp, Zea mays
  Clone ID: LIB3181-014-P1-K2-E9
atgcctggttttgggtaatatcttaagaggtgcaacgttctccgtgggtgttggtacgaggggggtttttaacaggtggggggacaagaaaagagccgaattagtgtaggaatggagatttctactttccgtagttgggttcgaacctgaagatggttttgtggtgtctgcttcgtctttagattatgcttcgtctccagaatccctaccctaaagagtgaaattgcgtagcttaaggtaggtgtttccccaatccgcgcaaaataaacgtaagggctgtctattggtaatagaattgaaagggttgaaggtttcaacccctcggcattgttggagaagtttaagtgggagtaagcattgccccctt

SEQ ID NO: 31385 - DNA, 296 bp, Zea mays
  Clone ID: LIB3181-014-P1-K2-F12
tccgtttctttctttaacatccaatctttttttttccgcaccagcatcttaacacggcctggattacccccaaactgaccgggtcattccatttttaaatattctacttatccaaccaaccccaccaattcaaccaattccattttcctttacctactttttcactttattaacaccctttagacaattttttcccttattaaatttccacttaccatatccaaaattttccttgtttattttatttctcccatatatttccatttcttttttaattttttttctttatttttttt

SEQ ID NO: 31386 - DNA, 386 bp, Zea mays
  Clone ID: LIB3181-014-P1-K2-F3
attgtactaaatctgtagcgcaccccttaattttttttcttttggaacaggaactactgtgagggcgattaacacatcatgggtagggactgtattcataacaataaaagaggggaaatataatatatgtttccacaactcccacggctaacatgtatgacctacatactaggtggatatggaccgaaaagattaggcctgatcaacattccatgcttctttacttatgcagccacactccaacatttgtctgacatggagatgccttatctatagtcctaaaaaacaaatactacttttatacatcaggggtaataaatcctacatttcctgcctattcttgattgacttaactttataggtttttgcctattttaccatcaaaa

SEQ ID NO: 31387 - DNA, 386 bp, Zea mays
  Clone ID: LIB3181-014-P1-K2-F4
gcagaactacctccgccccggggacgccgtcgtgctgttccacgtgcgccccacctccgttctctacggcgccgactggggttccatcccggtctccgtcgctgacgaggccgacgctgccgaggacgccgccgccgccgccgagggcggcccctccgaggaggagctgcagaagaagcgggaggaggaatacgacgccttcacctccaccaaggcgcaggacctcgcgcagccgcttgtcgatgcccagatccccttcaagatccatgtcgtcaaggaccacgacatgaaggagcgcctctgcctcgaggctgagcgccttggcctgtccgctatgatcatggggagccgcggttttggggcctcccggaaaggcggcaagggga

SEQ ID NO: 31388 - DNA, 375 bp, Zea mays
  Clone ID: LIB3181-014-P1-K2-F6
taacaacttattaagcacaattgtgtaccaacatatgtcacccaaaatatttcgcttccttaggctggttgtcctttctctagggggggataccccaaccatttccccacaatgctcacaagctccaataccttccctcattccccaatacctctgacaagcccaatcttcaatgtgtgaaaaccaaattgttcaaccctacagaacccaacatgcaattggaccaagtatcttaccattatcacccttatttctccaacaaccttcagccctattacagcagttacacttggtccatttggtgggacaaaacatcattgcccaacaactacaacaatctgggctagcaaaccttgttgtatactcttagcaaca

SEQ ID NO: 31389 - DNA, 431 bp, Zea mays
  Clone ID: LIB3181-014-P1-K2-F8
gctgtttacctccagcaacaacagtttcttccattcaatcaactagatggggtgaaccctggtttctacttgcaggcacagcggctactaccatttaaccaacttgtcgggagcccttatgccttcttactgcaacaacagcttctaccattccatttgcaagctgtggcaaacattgctgctttcttgagacaacaacatttgttgccattttacccacaggtggggggaaacattaatgccttcttgcaacagcaacaattgctaccattctacccacagaatgtggcaaacattgttgccttcttacaacaacaacaattgttgccatttagccaacatgctttgacgaatcctaccaccttattgcaaccgcccaccattggtggagccatcttttagattttttatgatttataactgaataataa

SEQ ID NO: 31390 - DNA, 416 bp, Zea mays
  Clone ID: LIB3181-014-P1-K2-F9
cggacgcgtgggcagccgccgtgcctcgttttcgtcttttcccctctgctcgagtacgagcggctactcccggcggctgggggggcggcaattagcgcggtgaacatcaccaacgtggcggtgctggataaccccaccgccttcctaaatcccttccaatttgagatctcctacaagtgcctcgtgcccctcgacaacaatctggagtggaagcttatatatgtgggatcagctgaagatgaaaactacgatcaacagcttgagagcgtgcttgttggccctgtcaatgttgggacctaccgttttgtccttcaggctgacccaccggatccctcaaagatacgtgaggaagacataattggtgtgactgcgctgctattgacatgctcttacatgggccaggagttcattgagag

SEQ ID NO: 31391 - DNA, 364 bp, Zea mays
  Clone ID: LIB3181-014-P1-K2-G10
gagatccaccgtttcaacaaggggcagcaggatgcgctgctgccgttcgtcgagtcggggctcgtgaccttgatcggcgcgacgaccgagaacccgagtttcgaagtcaactcggcattgctgtcgcgtgcgcaggtgtacgtgctgaagtcgctggacgacgacaagatgcgccagttgctgaagcgcgcgcaggaaatcgcgctcgacggcctcgcgttcgacgacaaggcgatcgatacgctggtcggctatgcggacggcgatgcgcggcgcttcctgaacctgctcgagcaggcgcaaacggcggcctcgtcggccggcgtcgcgacaatcgacgccgagttcgtcagcagcgcgatga

SEQ ID NO: 31392 - DNA, 278 bp, Zea mays
  Clone ID: LIB3181-014-P1-K2-G11
gaggatatcaaagaggtgcattttgttctgttctcggacgacctttacaatttatggggcgggactgcccagcagtgggtatcacattttgagaaatgaatggtccattggcagtttgctagcagttgcccagcagtcgttgtctagtgttgagatgtgagcgccatatgcagtttgcctggtgtaataaaaatgggtgtatcagacaacgtttaaatcttgatgaaaccgtgtattgcacctgtggtataatgctgaatgagtaaagtttggcgttt

SEQ ID NO: 31393 - DNA, 324 bp, Zea mays
  Clone ID: LIB3181-014-P1-K2-G12
aggaactccccccacaatggcataatattgtgcatgagccacagcacggacaactgggacgggtcgaaacggatcgcggggattaaagcctctgactattactggccgagagaccccgattcccataccatacacgatcgcgtccgtcgtttataacaccgtcttttttggggagttcatgcagccagactgggacatgttccatactgttcatcccatggctgaataccatgctgcgattggagcggttcgtggctgtgccatatatgccagcgacaagcctgggatccattacttcaatccgctcaaaaagctagtgctttc

SEQ ID NO: 31394 - DNA, 429 bp, Zea mays
  Clone ID: LIB3181-014-P1-K2-G2
cccacgcgtccgcaactagcaacatagaaagcacaatagggtaccaacattggcagccaaaatattttgcctccgtaggctccttggtctttctggaggggctgctacagcaaccattttcccgaaatgctcgcaagctcctatagcttcccttcttcccccgtacctctcaccagcggtgtctttggtatgtgaaaacccaattcttcaaccctacaggatccaacaggcaatcacagctggcatcttacctttatcacccttgttcctccaacaatcatcagccctattacatcagttacctttggtgcatttattggcacaaaacatcagggcacaacaactacaacaacttgtgctagcaaaccttgctgcctactctcagcaacagcagttttttccattcaaccaactagctgcattgaactc

SEQ ID NO: 31395 - DNA, 163 bp, Zea mays
  unsure at all n locations
  Clone ID: LIB3181-014-P1-K2-G3
gaacaagtagttgcacacccccttntcctttattaatccccgcctcctaataaccacatgaaaccgattctttctcattcgggggggctcattttatcacccctccaagattttggtctccaactgcctatttcatagtttgaagtgtatcacactattcttt

SEQ ID NO: 31396 - DNA, 343 bp, Zea mays
  Clone ID: LIB3181-014-P1-K2-G6
cgatctaaaccaatccattttatatatacattcttcttgccaacggttaaacaacttattggaaaggcaagacagccaatacgagagaggctttaaaatcggccgcgcttaagggatgtcctcagcgtcaaggaacatgtgctagggtgtttactatcaaccccaaaaaacccaactttgccttacgtaaagttgccagagtacgattaacctctggatttgaaataactgcttttatacctggttttggccataattttcaagaacattttttagtttttgtaataggtggatgggtttaggttttaccccggtgtgagatattttatttttttctgggtac

SEQ ID NO: 31397 - DNA, 437 bp, Zea mays
  unsure at all n locations
  Clone ID: LIB3181-014-P1-K2-G7
ttggccaaaanncccgggccggcccacgcgtacagcaacataaaaagcacaattttgtccctacatttgcagccaaaatattttgcctcctgagcgtccttgttcttactgcagggggggctacaacaaccattttcccgcaatgctcgcaagctcctatagcttcccttcttcccccgtacctctcaccagcggtgtcttcgttttgtgaaaacccaattcttcaaccctacaggatccaacaggcaatcgcagctggcatcttacctttatcacccttgttcctccaacaatcatcagccctattacaacagttacctttggtgcatttattggcacaaaacattagggcacaacaactacaacaacttgtgctagcaaaccttgctgcctactctcagcaacagcaattttttccattcaaccaactaggttca

SEQ ID NO: 31398 - DNA, 73 bp, Zea mays
  Clone ID: LIB3181-014-P1-K2-G8
cttttcttccccttccatgcgacctcatatcgcgggggttttttcacctaatgggagggcacctaccaacctc

SEQ ID NO: 31399 - DNA, 376 bp, Zea mays
  Clone ID: LIB3181-014-P1-K2-G9
agtccctctcctctcgaggtattagcagtcgaccggttcctcggagcacgatgaagggggtggctgcctacctgcttgcgggcctcgctgggaacgccagcccctccgctgacgatttgactgccattctggagtcagttggctgtgaagttgacaatgaaaagatggaactcctgctgtcccaactgagcggtaaggacatcaccgagctcattgccgcgggcagggagaagtttgcttcagtcccatgtggtggcggcggtgtcgctgttgcggcagctgcacctgctgctggcggagctgcttctgcagctgaggcaaagaaagaagagaaggtggaagagaaggaagaaagcgatgatgatatgggcttcag

SEQ ID NO: 31400 - DNA, 218 bp, Zea mays
  unsure at all n locations
  Clone ID: LIB3181-014-P1-K2-H11
gaanccggggccgacccactcttccggcccttcttcggccgccacttctgcttttttttatcatcacgtcgccaagtataagtgcgaggttttcttcacggtttggcgcgccttctccaaccactaccaccaccattttcaccacggttgccactgcttctttttcctcaagaccagtgtcgaataggacatttacaccttcaccggctaggtccact

SEQ ID NO: 31401 - DNA, 91 bp, Zea mays
  unsure at all n locations
  Clone ID: LIB3181-014-P1-K2-H5
gaattncngggcgcggcccaggcgttccgtgttttggaaacacaaagcgctgaacaaaaaggtgtatatattaccatagtcgagtgatgta

SEQ ID NO: 31402 - DNA, 419 bp, Zea mays
  Clone ID: LIB3181-014-P1-K2-H9
cccacgcttccgaaaaaaataaaaaaatttatttaaaaaaaaaaaaaaaaaaaaaaaaaggaagattaaaataaaaaaaagggggcggcccttttaaataatccaaccttacttccccttccatccaacgtaatacctcttttatagtgccacctaaattaaattaactgccctcctttttacaacgtcttaactggaaaaaccctgcctttccccaacttaatccccttgcacaaaatccccttttctccagttggcttattaccaaaaaggccctcaccattcgcctttccaaacattttcccaccctataatggcaaatggaaccccccctttatcgcccctttaaccccggcttgttttgtgtttacccccatttttaccgttacatttgccaactccctaacccccgttctttt

SEQ ID NO: 31403 - DNA, 108 bp, Zea mays
  Clone ID: LIB3181-014-P1-M1-A1
tcgcatcattggcggtgccctcttttagattgcttattagttgtcattcaataatgaagttttttggctgatgtatgtggcctcctagaaataagaagttatatttcc

SEQ ID NO: 31404 - DNA, 329 bp, Zea mays
  Clone ID: LIB3181-014-P1-M1-A10
ttacctactctttctcgctgcgagacaacacacccgttaacggtgctttataatgccggctcgcctcgaacaaactgctgcatctatatcccactctattctttttaattacgataaattgtactgagcctacttgaccgctcccccttgacttcctttctctccaccatcctttcttattattttacgaactctttctcacacacgctatctcttttaactacttacatctatacttgttctgaacaattatcttaccttcactatcaaccttgacattatcattttcatagaaatgaaacttacattgcgactttttttgcccctat

SEQ ID NO: 31405 - DNA, 52 bp, Zea mays
  Clone ID: LIB3181-014-P1-M1-A11
tgctttctcccacagccaaaaaaaaccatcgaagggttcttactcatgcatg

SEQ ID NO: 31406 - DNA, 218 bp, Zea mays
  Clone ID: LIB3181-014-P1-M1-A12
tcgatggagccgctgactagctacctagctcgctagtttactcatttagcggcgatgagtaacgtagtgtcacccatcaccatgggtggcagtgtgagcaatgacctgaatgaaccattgaaatggaaaggaataatatataaggaaaaaagatgattggtaaaaaaaaaaaaaaaaagaataataaaaaaaaaagacaaaaaaaaataataactaat

SEQ ID NO: 31407 - DNA, 309 bp, Zea mays
  unsure at all n locations
  Clone ID: LIB3181-014-P1-M1-A3
ctacgcttacgtgatcgactgatctgntatgggactgttgacttgggcggacgaccagacgctaggtctgtgcaaggcgccgcctcatactatagcacatggagacactggtccgaatgaaccgacaaaaccggcggcggcgtgtgccagttcgaacctgacacacggccacaactgatttcgtgcaagtctacaggcagcacagtcagtcaagcgtagttcacccgtgctcactcgatgcagactgccaatgccagcaggtccggtaccaactcgtcgtcacccgacatcgtcgtcggctcggcttga

SEQ ID NO: 31408 - DNA, 399 bp, Zea mays
  Clone ID: LIB3181-014-P1-M1-A4
tcgagcagatcaaacaagtagcgacagctcgacagagatttgtgagagtgatccggcgctgagaagagatggctaagatcgccgcagccgacgcggcggcggcggcgctgtgcttcgcggacctggtggccgcggtcgtctgccaaggcgaggtcgagcggcagaagctcacggacctgcagtgctggcaggaggtccaggagagcccgctcgacgcgtgccgacaggtgctcgaccggcagataaccggcggcggcgtaagcggaccgttccggtggggcaccgggctccggatgcggtgctgtcagcaactgcaggacgtgagccgcgagtgccgatgcgccgccatccggagcatggtcaggggctacgaggaggccatgccgactatggagaaag

SEQ ID NO: 31409 - DNA, 408 bp, Zea mays
  unsure at all n locations
  Clone ID: LIB3181-014-P1-M1-A5
tcggcgcgagggaaaacgacctattttaaccggcgatctacaagtcacaactaaaggaaggtgtcggaccaattggggggctaacgttaacaattacttttacttgattaaggattaggaggttaagcttggcttggaacttggcttaagatttttgagggggtgcgcattttcgaaacaaaaacaggaacctttatttgttaaggccctataggggaatgtgtgtgcccaaaaaattgttttgtgtttttattttcacatatcttaactatttccgatttatttatcttgtgtgcaacaagcactattctcctcttaaaaaaaaaaaaaaagaaagataaaaaaanataataattaatttaattttttttttattttnntttttttgtgtttttgtggtgttttttt

SEQ ID NO: 31410 - DNA, 316 bp, Zea mays
  Clone ID: LIB3181-014-P1-M1-A6
tcggttcgagggaaaacgacctattttagggggcgatctacaagtcacacgaaaagaaggtgtcgggacaattggggagcttacgttcacagataactctagctggataaggagtaggaagttcaggcttggcttgaagcttgcctcaggattttgtgagggtgttcgcattcgtgaagcaaaaacggaagccttcatggttaaggaccatagaggagaatgtaagtcccaaaaaattgtttttgtatttctattgacacatatctaaactattccagattcatttattctagtgtacaagaagcactatccacct

SEQ ID NO: 31411 - DNA, 296 bp, Zea mays
  Clone ID: LIB3181-014-P1-M1-A8
cgctggtcgccactgccgcttcttcctctcccttcccctcccgctaccacacgagcagcttcctgccgccgcagcgtacgcatggcctcgtcggacggctctgccgcggccctgcccagcgctaccgtcgatgtgcccggcgccggggcccctgtcctcgtcgtgggcgcgccggggctccccgaggctgacttcaggaacgcggtggagtcgtcgctgttcaagcagtggctgcggaacctgcagtcggagaagggcgtcctcacctacgggaggctgagcctcacgcgggttct

SEQ ID NO: 31412 - DNA, 391 bp, Zea mays
  Clone ID: LIB3181-014-P1-M1-A9
tcgggctgtgttacagctcacccctcaacggtgctgtgttttgttggcttgctatgaggaagctgctgcatctatatgccgcttcttcttgttaattcgataaatgtactgagcgacttgccggtcaccctgactgcctttctctccaccatcgtttctgatgatttcacgaactctgtgtcagacaggctatcgctgttgactactgacatctatacttgggctgaacaattatgctcacggacacgatcaacctggacatgatcgtattcatagaagtgaaactgagattgcgacttttttggccaatattcttctctctacatgcattacagtcgaggactacctgtcttgttataagcggctaaagcttgcaaatcttgaagcactc

SEQ ID NO: 31413 - DNA, 108 bp, Zea mays
  Clone ID: LIB3181-014-P1-M1-B1
tcgcatcattggcggtgccctcttttagattgctgattagttgtcattcaataatgaagttttttggctgatgtatgtggcctcctagaaataagaagttatatttcc

SEQ ID NO: 31414 - DNA, 306 bp, Zea mays
  Clone ID: LIB3181-014-P1-M1-B10
tcggcaaaggcatctgtggaatctgaagccaacatacctgatgacatttgtgctgcgagtattgcagatgatgcacaaagtgtattgcattctgctaaggtgctttggtgcaaatgaagaatagaaaaactaccatcccggggtaaattgaagacagtcaggtgctattgaagctattgaactctgttactgttccaacggcacaagacggataagaatgaaatcgctatatatgatggatttttggttggaagaacagaaggatcaccaatcagaattctttctactatagcatatattttttat

SEQ ID NO: 31415 - DNA, 367 bp, Zea mays
  Clone ID: LIB3181-014-P1-M1-B11
tttcttccggcaaaggcatctgtggaatctggaggcaacatacctgatgacatttctgctgcgagtattgcagatgatgcacaaagtgtattgcattctgctaaggtgctttggtgcaaatgaagaatagaaaaactaccatcccggtgtaaattgaagacagtcaggtgctattgaagctattgaactctgttactgtttcaacggcacaagacggatatgaatgaaatcgctatatatgatggatttttggttggaagaacagagggatcaccaaatagaattctgtctactatagcatataattttaatgttcattgtggggtgcaagttatatcaagggagcaaaatttgttgtattttttta

SEQ ID NO: 31416 - DNA, 173 bp, Zea mays
  Clone ID: LIB3181-014-P1-M1-B3
ttgcgggtcgcccgacacattgggtgacacatggatgtccggctcgagcggctactatgattcaaccaactgactttgtgctactgtgttaccctcctacgacagcgaccacacaaactgaatacacatggaccggctaacccattggttgtttgcggaggacagcatgaaca

SEQ ID NO: 31417 - DNA, 233 bp, Zea mays
  Clone ID: LIB3181-014-P1-M1-B9
ttttctttcaacaaaaacaaaaaaaaaatcgccaggcttaataacacatggcgccgcggccacaaatataacatattatccacaaaacccaaatcacaccgccaacgcgcacaactgcaaaactagtattttccaactaccattcccactttaatattttacacacacaatttctttttttttttctccccactatgttactaaacccagctcacattatttttttttttttt

SEQ ID NO: 31418 - DNA, 120 bp, Zea mays
  Clone ID: LIB3181-014-P1-M1-C10
ttttctttcttcaaaggccaatataaaatatggagggttaattactcataacttgtgggctataaatatttcatattatccacaaaatgtatttcattttactaactttctcaacttcta

SEQ ID NO: 31419 - DNA, 241 bp, Zea mays
  Clone ID: LIB3181-014-P1-M1-C4
tcgcctcgctgctctgtacccccatgatgaacaaaaactcctcgttttcagttgatgtgtgtgtgtgtgtgtatctcaaccagcgtctgtctacttcgctcgctcgctgtgtggggttttgctgcttgaggtggtggtggtcttgggcatgcgcctacttataagctgcaaagttttgtcacggcgcagggcgtcgtcttgtggtcgtcttgcaagttgcgccaaacaataaaattaaatt

SEQ ID NO: 31420 - DNA, 297 bp, Zea mays
  Clone ID: LIB3181-014-P1-M1-C7
tctcgttcgccaaggcagagctctcacgcgggcggcgtacctggccacctggggggcgcaaacagagccttatctttcccccctcccctccctttcgaacgactaccgaagaggcatccgaggtggccagccacgatgatggccgcagcggctctgatgccgcacaagtctttgtctgcccgggtgcccacacagagcgtggccccgctcttttccgtctgtttccttcgacagtgttggcattatcaacaggtactgtcactgttcctgagccttatacccgttgccccgacaagg

SEQ ID NO: 31421 - DNA, 232 bp, Zea mays
  unsure at all n locations
  Clone ID: LIB3181-014-P1-M1-C9
tttctcgttcgacaacggcacaaaaanaaggggcaggtttaaatacacatgcgggcggctccataaatattctatagnatcaccaaaatttaattcactctcctacgctttacaacttcaaaactggaaaaaccacgctcccacccaactttatctccttgcaacacatttccttttcaccagtttgcattataccaaacatccccctaacaatcacccatcccaacaaaat

SEQ ID NO: 31422 - DNA, 389 bp, Zea mays
  Clone ID: LIB3181-014-P1-M1-D10
ttttcatttttcacccgccactctaaaagagcgcaggggtaaataacaatgcgtgccgggttatatcctctctataatctcacctaaatttcaatacactctccgaccctttacaactttaccaactaggaaaacccttaccttacccaacttaataacccggacaaacatacctctttcaccatctttcttaatatacaaaaatccctaaccaaacactcttcccaacaatatcacaacctgaattgcaaactgtactccccttttacccgcacattaaacacaatctattgttttattttacactctaattcatactaatacaaatttccaatacacctaacacctctctactataactttttttcataatatctaactccacattt

SEQ ID NO: 31423 - DNA, 513 bp, Zea mays
  unsure at all n locations
  Clone ID: LIB3181-014-P1-M1-D3
aaaaaaaaaagggaagggagaaaaaananaaaaatnaaggaatagaaaaaaaatttttttttaaaaaaaaaaaaaaaaaaagggaagggaaaaaaaaaaagggggggggntataaaaaaaattaaaaaaaaatataaataaaaaaataattatttaaaaaaaaaaaaataaaaaataaaaaaaatataaataattaaaaaaaaatttaaaaaaaaaaaaaaattttaaaaaaataatatattttttaaataaataaaataaaattaattttataaggaattaaaaaagagaaaagaaatgaataaaaaaattaaaataaaattaatattaagaataataaaaaaaaaaaaaataaaatgtattataaaatatataaataaaatatagaaaaaataaataatttattaaaaaattttaaaataataaacaaactaaaaaaaaactttgagaataaaaaaacaatagattgattaactattaaaaaaacaagcaatttttatttataattaaaaa

SEQ ID NO: 31424 - DNA, 100 bp, Zea mays
  Clone ID: LIB3181-014-P1-M1-D5
tcttctatacactcacctaaatataattcactccccttccttttacaacatcctcacttataaaaccctatccttacccaacttaatcacctcccaacac

SEQ ID NO: 31425 - DNA, 336 bp, Zea mays
  Clone ID: LIB3181-014-P1-M1-D6
atgacaaaccctgaccgaagggagcgggtttcgaatgattcatgggggaatgcgagaaggtctataaaatgcgattataccattaacctgtccgttgaccacaatttccaccactgaatagacagggattgtatattgatcaacacgttccctgtatcatcgcctatcgagacttgccgaaacatggcacgacgccctgcgtgcgggttcacgttcacaccactgagacatatatcgcggatcgtaccctgcctacagcacgcctattatcaaccgacccgcattgtgactcgctcctcgcgactgacactcgatctaggcacgtaaacgcccgtc

SEQ ID NO: 31426 - DNA, 404 bp, Zea mays
  Clone ID: LIB3181-014-P1-M1-D8
tcgcaactagcaacatagaaagcacaatagtgtaccaacaatggcagccaaaatattttgcctccttatgctccttggtctttctgcaagtgctgctacggcgaccattttcccgaaatgctcgcaagctcctatagcttcccttcttcccccgtacctctcaccagcggtgtcttcggtatgtgaaaacccaattcttcaaccctacaggatccaacaggcaatcacagctggcatcttacctttatcacccttgttcctccaacaatcatcagccctattacatcagttacctttggtgcatttattggcacaaaacatcagggcacaacaactacaacaacttgtgctagcaaaccttgctgcctactctcagcaacagcagtttcttccattcaaccaac

SEQ ID NO: 31427 - DNA, 198 bp, Zea mays
  Clone ID: LIB3181-014-P1-M1-D9
tttctctttcgacgccagcacctctaaaagggccaaggtgtactaccaatgcatgcgacgatataaacctcctaatgtctcaactaaatttaatacactctccgacgcttaacaactttccgactatgaaaaccacttctatacccaacttaattaccttgcaacacataccacttgtgtcatctgtctttataaaca

SEQ ID NO: 31428 - DNA, 407 bp, Zea mays
  unsure at all n locations
  Clone ID: LIB3181-014-P1-M1-E1
tcgttcgaatcaagtcagattcagggaggggaaggcaaaaccctaacctgtgtcactccgccgccaccgggggagcgcgaggaggacccttcatcgacccgccgcacgaacaaagctcccatggccaacctcggcggtggcgccgaggcgcacgcgcgattcaagcagtacgagtatcgcgccaactccagcctcgtcctcaccacagactcccgcccgcgcgatacccacgagcccaccggagagcccgagacgctctggggcaggatcgaccccaggtccttcggcgaccgcgccgtccaaaacaagccgcccgagctcgaggagaagctctncaagtcgcgcaccaaaaagtctaagcgcgacgctgctggcccgctcgacttcggcgaccttccccgtcgcga

SEQ ID NO: 31429 - DNA, 354 bp, Zea mays
  Clone ID: LIB3181-014-P1-M1-E10
tttcgatgcctggatttgggtaatatgtgaggaggtgcaacgttctctgtgggtgtagatacaagtgtggtttttcacaggttcggatacaagaaaagagccgaattagtgtatgaatggagataactactttttttacttggtttctaacctgaatatggatttgtcgttgtattcttttgaatctagattattcttcgtttacagaattcctaccttaaagagttaatttttttatcttaaggtaggtgttttcacaatccgggcaaaataaacgtaagggttgtctatagaaaatagaatttaaatggtataagggatcaacctcctttaattgtttgataagattaattt

SEQ ID NO: 31430 - DNA, 52 bp, Zea mays
  Clone ID: LIB3181-014-P1-M1-E11
aattccctaaccttaattgcgaattggactcgccctgtaccggcgcattaaa

SEQ ID NO: 31431 - DNA, 282 bp, Zea mays
  Clone ID: LIB3181-014-P1-M1-E12
tcttaaacaaacaatcaaaaaaaatccaggggtacattcaaatgcatgcgcgggtcataaatataatataataaacacctaaattcaattcaactaaacaaaaatatacaaacataaaaactaaaaaaaaccataaaaagggcccaacttaataaaccttcaaaacaatccccccttcgccagctttcttaatatttttatatgccctcaccaaactccatttccaacacctgctcaaaacaaatggctaattggaaaaccccctggagccccaaactaaac

SEQ ID NO: 31432 - DNA, 179 bp, Zea mays
  Clone ID: LIB3181-014-P1-M1-E3
tcgcgccctcttttagatttcttatgagtgataggtcaataataaagttttgtatctgatgtttgtggcttcccagaaataagaaagtacatttctaaaaaaaaaaaaaaaaaaaataaaaaaaaaaaaaaaaaaaaaaaaaaaaaaaaaaaagggcggcctttttttttgttctctgt

SEQ ID NO: 31433 - DNA, 407 bp, Zea mays
  Clone ID: LIB3181-014-P1-M1-E4
tcggctcacttgctccaagttccattattacacagttcctcccaccagttacttcaatgggcttcgaacacccagctgtgcaagcctataggctacaacaagcaattgcggcgagcgtcttacaacaaccaatttcccagttgcaacaacaatccttggcacatctaacaatacaaaccatcgcaacgcaacagcaacaacaattcctaccagcactgagccacctagccatggtgaaccctgccgcctacttgcaacagcagttgcttgcatcaaacccacttgctctggcaaacgtagttgcaaaccagccacaacaacagctgcaacagtttctgccagcgctcagtcaactagccatggtgaaccctgccgcctacctacaacagcaacaactgctttcatct

SEQ ID NO: 31434 - DNA, 377 bp, Zea mays
  Clone ID: LIB3181-014-P1-M1-E6
tcggttttgaaaggggagagagagagagagaagagagagagaagagagagagagagagaggagtgggagacccgcgagaggctgccgtgtagggaccgtagactcagcgactgcgaaggagggataaggggatggccgggatcggaccgatcaggcaggactgggagccggtcgttgtgcggaagaaggcacccaccgccgccgccaagaaggatgagaaggccgtcaacgccgcgcgccgcgccggtgcggagatcgataccatgaagaagtacaacgctggtacgaacaaggcggcatccagcggtacatccctcaacaccaagcgccttgacgacgacaccgaaaacctcgcccatgagcgagtttcaagtgat

SEQ ID NO: 31435 - DNA, 331 bp, Zea mays
  Clone ID: LIB3181-014-P1-M1-E8
ataccatttatttactctactgcgcagcgcaacccaaccgacaccataccgttggggctctgttccctgcctttgctgtctttggtttcgatcgccacctcaactcataccatacgagggtgcggttggcatgcaccgcacccgggtcatttaatgtacccgctgcatttgatatgtcacgttcagctgacatgtcacgtgcatttcatatcgcacggccagctgacgtggccggtccagttgacatggcacggccatgtgatgtgcccgcgtcatttgatgtggcgaccataccattacactactctactgaaccggcctgagcttaatc

SEQ ID NO: 31436 - DNA, 369 bp, Zea mays
  Clone ID: LIB3181-014-P1-M1-E9
atgcctggttttgggtaatatcttaagaggtgcaacgttctccgtgggtgttggtacgagtgtggtttttcacaggtccggagacaagaaaagagccgaattagtgtaggaatggagatttctactttccgtagttgggttcgaacctgaagatggttttgtggtgtctgcttcgtctctagattatgcttcgtctccagaatccctaccctaaagagtgaaattgcgtagcttaaggtaggtgtttccccaatccgcgcaaaataaacgtaagggctgtctattggtaatagaattgaaagggtagaaggtatcaacccctcggcattgttgggagaagttaagtgggagtaagcattgcccccttac

SEQ ID NO: 31437 - DNA, 129 bp, Zea mays
  Clone ID: LIB3181-014-P1-M1-F12
tcgtccgctacgatctctaacctgggctggtgttatatacaaaggggcggggcaacaccaacttgaggaccccccaactcgccagctgcagccatggtgaaatattcgactgagccaaccaaccccacc

SEQ ID NO: 31438 - DNA, 401 bp, Zea mays
  Clone ID: LIB3181-014-P1-M1-F3
atttaacagaaaatatattccatcattgaaagtgagttccgttgttttgggtgctactggtagggagaataagacatcatggcctgaggtggtgggcatgtccatcaaggaggcaagagagatcattcttaaagacatgcccaatgctaacattcaagttctaccggttggctcgcttgtgacccaggactttcgccctgatcgtgttcgcatcttcgttgatattgttgcccagactccaacagttggctgacaaggagatgccttatctatagtccaaataaacaaagcctacttttatgtatcatggctaataaatcctacatttcttggttatccttgattggtttagcttattagctatatgcctatatcaccatcaaaagggggccccaagaaat

SEQ ID NO: 31439 - DNA, 357 bp, Zea mays
  Clone ID: LIB3181-014-P1-M1-F4
gcagaactacctccgccccggggacgccgtcgtgctgctccacgtgcgccccacctccgttctctacggcgccgactggggttccatcccggtctccgtcgctgacgaggccgacgctgccgaggacgccgccgccgccgccgagggcggcccctccgaggaggagctgcagaagaagcgggaggaggaatacgacgccttcacctccaccaaggcgcaggacctcgcgcagccgcttgtcgatgcccagatccccttcaagatccatgtcgtcaaggaccacgacatgaaggagcgcctctgcctcgaggctgaagcgcctggcctgtccgctatgatcatggggagccgcgggtt

SEQ ID NO: 31440 - DNA, 401 bp, Zea mays
  Clone ID: LIB3181-014-P1-M1-F6
ttgcaacatagaaagcacaatagtgtgccaacaatggcagccaaaatattttgcttccttatgctccttggtctttctgcaagtgttgctaccgcaaccattttcccacaatgctcacaagctcctatagcttcccttcttcccccatacctctcaccagcggtgtcttcaatgtgtgaaaacccaattgttcaaccctacaggatccaacaggcaatcgcaacaggcatcttaccattatcacccttgttcctccaacaaccgtcagccctattacagcagttacccttggtccatttggtggcacaaaacatcagggcacaacaactacaacaacttgtgctagcaaaccttgctgcatactctcagcaacatcagtttcttccattcaaccaactggc

SEQ ID NO: 31441 - DNA, 400 bp, Zea mays
  Clone ID: LIB3181-014-P1-M1-F8
gctgcttacctccagcaacaacagttgcttccattcaatcaactagatggggtgaaccctgctatctacttgcaggcacaacagctactaccatttaaccaacttgtcgggagcccttatgccttcttactgcaacaacagcttctaccattccatctgcaagctgtggcaaacattgctgctttcttgagacaacaacatttgttgccattttacccacaggttgtgggaaacattaatgccttcttgcaacagcaacaattgctaccattctacccacagaatgtggcaaacattgttgccttcttacaacaacaacaattgttgccatttagccaacatgctttgacgaatcctaccaccttattgcaaccgcccaccattggtggtgccatcttct

SEQ ID NO: 31442 - DNA, 395 bp, Zea mays
  Clone ID: LIB3181-014-P1-M1-F9
cggacgcgtgggcagccgccgtgcctggctttcgtcttttcccctctgctcgagtacgagcggctactcccggcggctgcggcggcggcgatgagcgcggtgaacatcaccaacgtggcggtgctggataaccccaccgccttcctcaatcccttccaatttgagatctcctacgagtgcctcgtgcccctcgacgacgatctggagtggaagcttatatatgttggatcagctgaagatgaaaactacgatcaacagcttgagagcgtgcttgttggccctgtcaatgttgggacctaccgttttgtccttcaagctgacccaccggatccctcaaagatacgtgaggaagacataattggtgtgactgtgctgctattgacatgctcttacat

SEQ ID NO: 31443 - DNA, 410 bp, Zea mays
  Clone ID: LIB3181-014-P1-M1-G10
gagatccaccgtttcaacaaggggcagcaggatgcgctgctgccgttcgtcgagtcggggctcgtgaccttcatcggcgcgacgaccgagaacccgagtttcgaagtcaactcggcattgctgtcgcgtgcgcaggtgtacgtgctgaagtcgctggacgacgacgagatgcgccagttgctgaagcgcgcgcaggaaatcgcgctcgacggcctcgcgttcgacgacaaggcgatcgatacgctggtcggctatgcggacggcgatgcgcggcgcttcctgaacctgctcgagcaggcgcaaacggcggcctcgtcggccggcgtcgcgacgatcgacgccgagttcgtcagcagcgcgatgacgctgaacgcgcggcgcttcgacaggggcggcgacaacttctacga

SEQ ID NO: 31444 - DNA, 408 bp, Zea mays
  Clone ID: LIB3181-014-P1-M1-G11
gtgatccttcgtttcaacaaggggcagcagggtgcggggctgacgttcgtcgagtcggggctcgagaccttcatcggcgcgacgaccgagaaccctagtttcgaagtcaactcggcattgctgtcgcgtgcgcaggtgtacgtgctgaagtcgctggacgacgaccagatgcgccagttgctgaagcgcgcgcaggaaatcgcgctcgacggactcgcgttcgacgacaaggcgatcgatacgctggtcgtctatgcggacggcgatgcgcggcgcttcctgaacctgctcgagcaggcgcaaacggcggactcgtctgccggcgtcacgacgatcgacacctaatttgtcagcagcgcgatgacgctgaacgcgctgcgctttgacaagggcggagacaacttttac

SEQ ID NO: 31445 - DNA, 405 bp, Zea mays
  Clone ID: LIB3181-014-P1-M1-G2
caactagcaacatagaaagcacaatagtgtgccaacaatggcagccaaaatattttgcctccttatgctccttggtctttctgcaagtgctgctacggcgaccattttcccgaaatgctcgcaagctcctatagcttcccttcttcccccgtacctctcaccagcggtgtcttcggtatgtgaaaacccaattcttcaaccctacaggatccaacaggcaatcacagctggcatcttacctttatcacccttgttcctccaacaatcatcagccctattacatcagttacctttggtgcatttattggcacaaaacatcatggcacaacaactacaacaacttgtgctagcaaaccttgctgcctactctcagcaacagcagtttcttccattcaaccaactagc

SEQ ID NO: 31446 - DNA, 364 bp, Zea mays
  Clone ID: LIB3181-014-P1-M1-G7
tcggcaacatagaaagcacaatagtgtacggacaatggcagccaaaatatgttgcctccttatgctccttggtctttctgcaagtgctgctacggcgaccattttcccgcaatgctcgcaagctcctatagcttcccttcttcccccgtacctctcaccagcggtgtcttcggtatgtgaaaacccaattcttcaaccctacaggatccaacaggcaatcgcagctggcatcttacctttatcacccttgttcctccaacaatcatcagccctattacaacagttacctttggtgcatttattggcacaaaacatcagggcacaacaactacaacaacttgtgctagcaaaccttgctgcctac

SEQ ID NO: 31447 - DNA, 372 bp, Zea mays
  Clone ID: LIB3181-014-P1-M1-G9
agtccctctcctctcgaggtattagcagtcgaccggttcctcggagcacgatgaagtttgttgctgcctacctgcttgctgtcctcgctgggaacgccagcccctccgctgacgatttgactgccattctggagtcagttggctgtgaagttgacaatgaaaagatggaactcctgctgtcccaactgagcggtaaggacatcaccgagctcattgccgcgggcagggagaagtttgcttcagtcccatgtggtggcggcggtgtcgctgttgcggcagctgcacctgctgctggcggagctgcttctgcagctgaggcaaagaaagaagagaaggtggaagagaaagaagaaagcgatgatgatatgggct

SEQ ID NO: 31448 - DNA, 388 bp, Zea mays
  Clone ID: LIB3181-014-P1-M1-H1
tcgaattagctcatcgactccagattggagaacgcgacaccatgaaggtgctgatcgttgcccttgctctcctggcgctcgctgcgagcgccgccttcagtacaagcggcggctgtggctgccagacaccaccgtttcatctaccgcctccgttctatatgccgccttcgttctatctgccgccgcagcagcagccgcagccatggcaataccccactcaaccaccgcagctaagcccgtgccagcagttcggatcctgcggcgtcggcagcgtcggcagcccgttcctgggccagtgcgtcgagttcctgaggcaccagtgcagcccggcggcgacgccctacggctcgccacagtgccaggcgctgcagcagcagtgctggcacca

SEQ ID NO: 31449 - DNA, 124 bp, Zea mays
  unsure at all n locations
  Clone ID: LIB3181-014-P1-M1-H3
aaaaaaaaaggggggggggggggnaaaaaaaaaaaaaaaaaaaaagaagaaaaaaaaaagtttttatttaaaagaaaaaaaaaaaaaaaaaggggggatgaaggaaaaaaaaaagggggggggg

SEQ ID NO: 31450 - DNA, 152 bp, Zea mays
  Clone ID: LIB3181-014-P1-M1-H6
cctaatcgtaccctccctttatcttctcattaatctcttcctttcttctcttttacactcaacttaacctctacactttccatctccctaccaccctctcctttcactttcttcccttcctttctctcccctttttcactctttccccttca

SEQ ID NO: 31451 - DNA, 76 bp, Zea mays
  Clone ID: LIB3181-001-P1-M1-A2
aaaaaaacaaaaaaaaaaaaaaaaaaaaaaaaaaaaaaaaaaaaaaaaaaaaaaaaaaaaaaaaaaaaaaaaaaaa

SEQ ID NO: 31452 - DNA, 76 bp, Zea mays
  Clone ID: LIB3181-001-P1-M1-D6
aaaaaaaaaaaaaaaaaaaaaaaaaaaaaaaaaaaaaaaaaaaaaaaaaaaaaaaaaaaaaaaaaaaaaaaaaaaa

SEQ ID NO: 31453 - DNA, 318 bp, Zea mays
  Clone ID: LIB3181-001-P1-M1-G5
gtgttctaccaacaacccatcattggtggtgccctcttttagattgcttatgagttatagttcaataatgaagttttttggatgatgtttgtggcgtcccagaaataagaaagtacatttctagaaaaaaaaaaaaaaaaaaaaaaaataataaaaaaaaaaaataaaaacaaaaacttaaagggaaatcccaacacacaaataaacaaagactataagatacaacaagaaaaaaggggggggcggttttaaaggatccaagtttacatccgcgtccatgcgacgtaatagcttttttttgggggcacctaaattaaa

SEQ ID NO: 31454 - DNA, 118 bp, Zea mays
  Clone ID: LIB3181-002-P1-M1-B1
ggacgcgccctgttgcggctcatttatgcttggtgggtgtggtgtgttttttaattttacttttttttcttttttttgtccttttttttatttcttattttatttttttttttttttt

SEQ ID NO: 31455 - DNA, 317 bp, Zea mays
  Clone ID: LIB3181-002-P1-M1-B3
gcaagcaacaacggttgattatatccagacatgcataaacgttaaatcgacacttcagtatctgctgtaaatcagaaagcataattcagctcatagatgaactataaactctttaagaccatgaatgacgcaccagagcagtatatcaaccacaataagacagttctcaaaagatgcagtacgatgcatcctagttacccatgttgtcgaaacattacatcttctgcatgataaccgagtttgccagtccagcttgcaccacggtctgcgttgggtcagccagctgcttgggtgggaaacctgtctgcagctgatac

SEQ ID NO: 31456 - DNA, 164 bp, Zea mays
  Clone ID: LIB3181-002-P1-M1-B5
tcggaaactatgtgctgtactatacccgctggctagctagctagttgagtaatttagcggctattatcgagtcataatgagtcacgcatcaccctggttggcagatgaagggcgagcaatgacctggatgaacaattgaagtgaacagaaaaaaggattgactc

SEQ ID NO: 31457 - DNA, 298 bp, Zea mays
  Clone ID: LIB3181-002-P1-M1-C2
tcgctaaatggtagtagtatttagccagggggctgcagcaagccgtgcttccttcttgacacagcaacagttgctgcctttctaccagcagtttgcggctaaccccgcaaccctcttacaactacaacaattgttgccctttgtccaacttgctttgacaaacccagcagcctcctaccaacaacacatcattggtggtgccctcttttagattgcttattagttgtaattcaataataaagttttttggatgatgtatgtggccaaccagaaataagaagttacattttcagattct

SEQ ID NO: 31458 - DNA, 80 bp, Zea mays
  Clone ID: LIB3181-002-P1-M1-D6
tcttaaaaaaaaaaaaaaaaaaaggagaaggggaaaaataaaaaaaaaaaaaaaaaaaaaaaattaaaaaaaaataaaaa

SEQ ID NO: 31459 - DNA, 107 bp, Zea mays
  Clone ID: LIB3181-002-P1-M1-H6
gtgcattccacgtcataactcttctatcgtgccacctcaatcaaattcacaggtcttctatagtgccacctaaatacagataaatgcccgtcgttgcacaacttaat

SEQ ID NO: 31460 - DNA, 240 bp, Zea mays
  unsure at all n locations
  Clone ID: LIB3181-003-P1-K2-A11
cgtccgatacctcataagaattctaaaagagggctctttttttttttggcaccctctnacaactgcggcaggtgttgttattcaactaacttgctttgacaaacccagcagcattctaccaacaacccatcattggtggtgccctcttttagatttcttatgagttatagttcaataataaagttttttgtctgtaaaataaaaatattatcttttttatcttatttaatatttaaatat

SEQ ID NO: 31461 - DNA, 234 bp, Zea mays
  Clone ID: LIB3181-003-P1-M1-A4
tcgcacagttgttgccgttctaccagcacgctgcgcctaacgctggcacgggcttacaactgcaacaattgctgccattcaaccaacttgctttgacaaacccagcagcattctaccaacaacccatcattggtggtgccctcttttagatttcttatgagtcatagttcaataataaagttttttgtctgaaaaaaaccacagagctctcactaaactgaaacaaattacaaa

SEQ ID NO: 31462 - DNA, 102 bp, Zea mays
  Clone ID: LIB3181-003-P1-M1-E7
tcgatctaaaagagggcaccaccaatgatgggttatagttcaataatgaagttttttggatgatgtttgtggcttcccagaaataagaaagtacatttctag

SEQ ID NO: 31463 - DNA, 267 bp, Zea mays
  Clone ID: LIB3181-004-P1-M1-A10
tttcttttgagccctgctaccttcttgacacagccgcagttgttgccgttctaccagcacgttgcgcctaacgctggcaccgctcttacaactgcaacaattgctgccattcaaccaacttgctttgacatacccagcagtgttctaccaacaacccatcatcggtggtgcccttttttagattttttatgagttatagttcaataataaagttttttatccgatgtttgtggcttcccagaaataagaaagttcatttctagattt

SEQ ID NO: 31464 - DNA, 384 bp, Zea mays
  Clone ID: LIB3181-004-P1-M1-G3
agggaaagccgtgcggccggccgtaaccttgcatcctttacagcgtcggcccacgctttcttttcattgaactatgctgcttatttagaggggcaacacctactaccagagagccaactctctttagtgagccctgcttccttctagacacaaccacaggcgccgccgatctaccagcacgctgcgcctaactgctggcaccgtcttacaactgcaacaattagctgccattcaaccaacttgctttgacaaacccagcagcattctaccaacaacccatcattggtggcgccctgttttagatttcttatgagtgatagttcaataataaagtgctgggtctagatgtttgggcttcccagaaataagaaagtacatttctag

SEQ ID NO: 31465 - DNA, 269 bp, Zea mays
  Clone ID: LIB3181-006-P1-K2-D8
aatattttttgcctcgaaatgtgatcacgtgggagttttttagaagatttattcaacctcgcacactcaaatctccgaattcattttacacacgttttgaatgcaatttaacaaggacattccccttgcttttccaaactcacactcactcaaatttcttcatcgttcttgtctttaaatgggtctttattcatgtagtcgcctacctttacttattctggccttacaattgccctatgacctttgatgtcactcaaattagctaatgc

SEQ ID NO: 31466 - DNA, 196 bp, Zea mays
  Clone ID: LIB3181-007-P1-K2-B11
gaccgatcgatcgccacagccaacaccacccttcgaggcgacgcgacagccgccaggaggaaggaataaactcactgccagccagtgaagggggagaagtgtactgctccgtcgaccagtgcgcgcaccgcccggcagggctgctcatctcgtcgacgaccagctcgtcgcaacgcccgccggcctgggcgtcccg

SEQ ID NO: 31467 - DNA, 219 bp, Zea mays
  unsure at all n locations
  Clone ID: LIB3181-007-P1-K2-H6
ccgtcccgcgcgtncgttcttacaactgcaacatttgctgccatttttttttcttgctttgacaaacccagcagcgtgctggctacatcccatcattggtggtgccctcttttagatttcttatgagttatagttcaataataaagatttttgtctgatgtttgtggcttcccagaaataataaagtacatttctaataaaaatattagttaatataat

SEQ ID NO: 31468 - DNA, 192 bp, Zea mays
  Clone ID: LIB3181-007-P1-M1-A7
cgtccaacttaatgctgcccatccctttcgcgtgggtatgcaaaggccgaccgatgcttcaacagtgcagctgaggcaatggacgccctgagcggccattaccgcgtgtggggtacccacggccgtcactgcaggctacgccgtctttgttttcttcttttgcagtcgcgcttccctagcttaatcgggttc

SEQ ID NO: 31469 - DNA, 94 bp, Zea mays
  Clone ID: LIB3181-007-P1-M1-A8
atattacatatgatgacaaactcgataattgtgaaaactatacccgcttgtgtactctataaataatcaatactattggccgatattcatctgg

SEQ ID NO: 31470 - DNA, 65 bp, Zea mays
  Clone ID: LIB3181-007-P1-M1-C10
agacaatgtaccgggaaaaatcactggctgtgtctccataaataacacattttgcagctcgaaga

SEQ ID NO: 31471 - DNA, 325 bp, Zea mays
  Clone ID: LIB3181-007-P1-M1-F6
ttttgttgaaaaaagcttaaggggatacaagcaaactatacgcaagcaatgctatatcattcctaataaaataatgttaccataaaaaaaaatcaatgatcggggggttcacatctggagggactagggttacgaccgctttcacctcaacttaatagcttttgtatagtagtcaccttattttaatttattgtcatagctattacatcctcatggctgggaaatccttaccgttacccaacttaattggctaatggtactctcccttttgcccagcttttattattgctaatgggtctgctactattcatcatttccaatactt

SEQ ID NO: 31472 - DNA, 405 bp, Zea mays
  Clone ID: LIB3181-007-P1-M1-G8
gacccaggcctacccaaacattcgcgcccctgtctctccccgccgccaccctgccccggcgccgtagagcacggcgctggcccttgtttccctcccccggccggacctcggaagtatgtctcgggccatcgaatcgacaatgaggcaatctcggcagtttgtgaatctgatcatgaccaatctttacaacggcgccaagtccctgcacttcgtggacctgaagcggcagccactatttaagacaccactgccacctacggcatctacagacggagacagatttgaaacacaagacgctttctctcagacacagccaactgaatccttggtgttggagagacttcgcctttcccgtccgagcttccaattcgaaacttccactgcacaagatcgcagctggtacat

SEQ ID NO: 31473 - DNA, 80 bp, Zea mays
  unsure at all n locations
  Clone ID: LIB3181-008-P1-K2-D11
gcgnncgaaaaaaaaataaaaaaaaaaaaaaaaatttttttttaaaaaaaaaaaaaaaaaaaaaaagggggcgggttttt

SEQ ID NO: 31474 - DNA, 125 bp, Zea mays
  Clone ID: LIB3181-008-P1-M1-C1
ttcttttttatcagatcgaatttcttttcagagcacctgccacctgaagatttttttgggattaaaaaaaaaaaaaaaaaaaaaaaaaaaaaaaaaaaaaaaaaaaaaaaaaaataaaaaataaa

SEQ ID NO: 31475 - DNA, 153 bp, Zea mays
  Clone ID: LIB3181-008-P1-M1-E9
tctgttgtattgtagagatgggcacgcccggctgctatcgctgaagagatgggagggcgagcgatactccggtctagttgctggtattcttggtgtatttcttactataatggcccaatcttaaggttatatgagcagcaatttttatgaacc

SEQ ID NO: 31476 - DNA, 200 bp, Zea mays
  Clone ID: LIB3181-009-P1-K2-B5
cacaacattgatggtgccctctttcagatttctttttagctgcattccaattataaagggtttgggtttgatttatatttccaaccataaataataagttacatttccagattctattaaaataaaaaattaataatacctggctgactctctatacaatccaagcttacttactcgatcattcaactatattaattttt

SEQ ID NO: 31477 - DNA, 61 bp, Zea mays
  Clone ID: LIB3181-009-P1-K2-C9
ggactctccctgtatcagctcattaagcgcgtctgttgtggtggttactcgcagcgtggcc

SEQ ID NO: 31478 - DNA, 94 bp, Zea mays
  unsure at all n locations
  Clone ID: LIB3181-010-P1-K2-B10
gggccgacccacgcgtncgtttatttgttaataaataatgaatttttttttctgatgtatgccagcctcctaggggtagggtgtaatatttctc

SEQ ID NO: 31479 - DNA, 210 bp, Zea mays
  Clone ID: LIB3181-010-P1-K2-C1
agcgaaagaagacaaagtccaaattattccaaaaccacggcaaactgcccattcatcgaactataaagtttcttttctgtcatttttattccaggagctgtggcctgggtgggggcaggggcatacggcaacggcgacggcgcctagacggctggaccgagagggaggcggcttgcccgcctagaggttgaacatgacttttatggcatc

SEQ ID NO: 31480 - DNA, 85 bp, Zea mays
  unsure at all n locations
  Clone ID: LIB3181-010-P1-M1-A6
acatttaattttgtgccagaaacaaaaangggggccggttttatttaaagaagaacgcccccaaacaacgcgacacttttacgaa

SEQ ID NO: 31481 - DNA, 153 bp, Zea mays
  Clone ID: LIB3181-010-P1-M1-B8
ctgcatgcgcacaacatacctcatgtatagtgacacctaaatgcaacaaactggccgaaggtctacaactaatagactggaaaaaccactacactacccaacttaatcaaattgctgaacatacaaatttcaacagccggcgtttttacacag

SEQ ID NO: 31482 - DNA, 210 bp, Zea mays; identical to SEQ ID NO: 31479
  Clone ID: LIB3181-010-P1-M1-C1

SEQ ID NO: 31483 - DNA, 54 bp, Zea mays
  Clone ID: LIB3181-011-P1-K2-A12
tttcgcgtgcgtgccacgccatcgggggggggttgtgccacataaatgtgaggg

SEQ ID NO: 31484 - DNA, 208 bp, Zea mays
  Clone ID: LIB3181-011-P1-K2-B11
tgtcttatttcttatatgccctttcctttctccttttcccaacattttcacaccctgaaaggcaaaaggtaccctccctttattctcccattaatccctgctttttttgttttttctctcatcttatcctttacattttctaattccttatctcccgcttcttttcttttttttcccttctttttttctcatattcttctatttttcc

SEQ ID NO: 31485 - DNA, 145 bp, Zea mays
  Clone ID: LIB3181-011-P1-K2-D1
ttttgaatgcgtaaatggtacgcgccctgttgcgcatcattaaccacacccgctgtggtggttactcacatataaaccggtacacttgccatttccataccccccaatccttaagatttatttcctccctttattaacacgttcg

SEQ ID NO: 31486 - DNA, 100 bp, Zea mays
  Clone ID: LIB3181-011-P1-K2-D5
aattccgggccgggagctcactagttttaacacgtatatagtatccatcttatttctcttgcagctacacataactctggggagttttcccaaaggaagg

SEQ ID NO: 31487 - DNA, 407 bp, Zea mays
  Clone ID: LIB3181-011-P1-K2-F7
ggggggatagtttaacctaaagggaggggacttccttctttttacaactttttgtctgtattatatcctggctttacctatattaattttcttttgtatttattttcttttttctttttgttttatataatttgttttttttttaatatatttttattttttttcttatttcatttttttttttttactctccttttttttttcatatatatttttatcttttattattattaatttttttattttttattattatggtgttgttttttaatattttttaaatttttttttatttttcatatctaattctcctcttttcttttttttctttattttattttttattattcattttttatatatattattttattatcatatttatttacttattatttatttttatt

SEQ ID NO: 31488 - DNA, 130 bp, Zea mays
  unsure at all n locations
  Clone ID: LIB3181-011-P1-M1-C6
acctaattaaactctccctntatcctcgcattaatcgctacatattttatttttacactcaactttacctctacacttaccaacaccctaacttcctctcctattcctttctttccttccattctctcca

SEQ ID NO: 31489 - DNA, 173 bp, Zea mays
  unsure at all n locations
  Clone ID: LIB3181-011-P1-M1-D1
ctcaaatggtacgcatcctctancacatcattaagcacaccccctatgttggttactcacatataaactagtacacttgtcatctccataccgcacaattcttaatatatatttcttccatttattaacacgttcatccgctataatcgataagctataaatcactaactaac

SEQ ID NO: 31490 - DNA, 131 bp, Zea mays
  Clone ID: LIB3181-011-P1-M1-D5
ttctaatattactcaccctttatcagctcattaagcgcacctatttttctttttactctcatcttcacccttacactttccaactccctatctcccacacctttcactttcttccctttctttcttccact

SEQ ID NO: 31491 - DNA, 73 bp, Zea mays
  Clone ID: LIB3181-011-P1-M1-F1
tagctcattattttgcggccgctctaaaaaatccacgggccgcttcatttaatatgcggggggggagctataa

SEQ ID NO: 31492 - DNA, 176 bp, Zea mays
  unsure at all n locations
  Clone ID: LIB3181-011-P1-M1-F7
tnctaattttactctctctttatcctctcattaagctcgtctatttttatttttattctcattctttccttatactcttttttttttctttattcttttttttttttctattattattaattacttttttacttatttttttttatattttcttctatatcttttatttataatat

SEQ ID NO: 31493 - DNA, 146 bp, Zea mays
  Clone ID: LIB3181-014-P1-K2-E12
caaaaaaccaaaaacgcaccgtcctgtattctttttcactaagttctagttcttttgggcttggttaaaaatataaacagggaggtttcaaaaaaaaaaaaaaaaaaaaaaaaacagataaaaacaaaaaaatggcccaacttaat

SEQ ID NO: 31494 - DNA, 274 bp, Zea mays
  Clone ID: LIB3181-014-P1-M1-A7
aattcccgaatttccctttcgacttacttttttaaacaaaaagaaaaaaacgcgtggtggtattatttccactggggctgcgcacaacaacaactatctaccatcgcatagcacacatggactggtaacaccgctatgccgtggccattgccaaagctaccgcccatgtgcccagtgccaggaaccatcaccttttcttggtcccgccaggtcttcactaggctgactttaggaacgcttggtaaaccatatctgctcaatcaatggcaaatgg

SEQ ID NO: 31495 - DNA, 61 bp, Zea mays
  Clone ID: LIB3181-014-P1-M1-B7
tttcttattaaacagaagacaatctaaaaggtgcacgcttacttacacaagcgggcggggc

SEQ ID NO: 31496 - DNA, 69 bp, Zea mays
  unsure at all n locations
  Clone ID: LIB3181-014-P1-M1-E7
cccacgccgtcccgnnatggctgtttacccgttgttgctgtcaatcgtcggagatgcctttacatggtt

SEQ ID NO: 31497 - DNA, 199 bp, Zea mays
  Clone ID: LIB3181-014-P1-M1-F7
tttcttccgcaacaacccatcattgacggtggcctgttttatattgcttatgggtgggagttcaataatgaagttctttggatgattattgtgtcttcccacaaataataaagtacatttctagattctaaaataaaaataaaaaaaagggccgcacgcactagagtattttattcttactttctctttcatgccaacg

SEQ ID NO: 31498 - DNA, 68 bp, Zea mays
  Clone ID: LIB3181-014-P1-M1-G12
atgctcattcttctacacacgatctaaaagatccagcgtgacctactcatgcatgcggggctataaac

SEQ ID NO: 31499 - DNA, 126 bp, Zea mays
  Clone ID: LIB3181-014-P1-M1-H9
gtactctccctgtagcggctcattaatcgcgacggatttattggttactcgcaacttgacctttacactttccaactccctaactcccctttctttcactttctttccttcctttctcaccacctt

SEQ ID NO: 31500 - DNA, 544 bp, Zea mays
  unsure at all n locations
  Clone ID: LIB3181-014-P1-K2-B5.R2
gggggggggggggggggggggggggggnngggngggggggggggggttccactcacggtggggggggggggngggggggggggggcccccccccnnnggggggtcgggggggggggttgtttttnnncnnccggccgtcgggcgcctttggggggggggtggttgggggggggttcnnttnttcttctttcccgggggggggggcgggggggggggggggcgggggggggggtgggggggggggggggggggggggggggggggcgggggggggggggggggggggggggggggggggggcgggggcgggggggggcggggggcggcggggggggcgcgggggggggggggggggggggggggcgggggggtgtggccgggtgggcgggggggggggggggggtgggggcgcgggcggggtgtgcggctggtcgggggggcggggggggggggggtcggggggggcgggggggcggcggcggcgggtggggggggggggggcggggggcggggggggggggggggggggggggggcgcgggggg

SEQ ID NO: 31501 - DNA, 439 bp, Zea mays
  Clone ID: LIB3181-003-P1-M1-G10.F2
tacagacctccgtctgctgatggcacagtacgctcatagccaccacattgatcggactcttcgtctccagtccaagcaagcgaagagcacccctggagatctctgcctctccgcgccgccatggacgcaggtgactaggtagtctacccgctccgggagttcgctcaaggacagcatgcgtctcgacaagcgctgccacaagccgcgaccgcatggagttcaccaaggtcgccgcgcggactgcgatcggcttcgtcgtcatgggagtcgtcggcttctttgtcttgctcatcttcatccctatcaacaacatcattgtcggatccggctgatccgatcacctcatgctagtggctgccggagtggacaatggcgatactaccttggaggctgcaccgttttaaactctgatttccgcaaagcaatgcctttaggactt

SEQ ID NO: 31502 - DNA, 284 bp, Zea mays
  Clone ID: LIB3182-001-P1-M1-A1
ctcccacacaaacgccaccgccgcatcgaatccgagacgccgatctcggattcgccgtcaccacacgctgccctcgtcgcgctctcccgccgccgccgctcgtctcgtcagccatggcaggattggcaccagaagggtcgcaatttgatgacaagcagtatgacaagaaaatgcaggagatattaactgaagacttcttcacttcatatgatgatgtttgtgaaagttttgacagcatgggactgcaagagaaccttctgagaggcatctatgcctatgggttt

SEQ ID NO: 31503 - DNA, 240 bp, Zea mays
  Clone ID: LIB3182-001-P1-M1-A10
tcgatcctctccctcgccatcatcgtctacgtctccgacgctccccctcggtcccctccccaccttccgttctctcccttcttggatagggttagagactgagctaccccgcacgctgcgcgagccatggtcttctttacctgttcccaggtcggcgcgaccgcagcgggcggagcctcgcccttcctcggctaccggaggcggagcggcccctggggagccaccccgtcgagcttcctt

SEQ ID NO: 31504 - DNA, 312 bp, Zea mays
  Clone ID: LIB3182-001-P1-M1-A11
gagaggttcactaatgccctctttcactatgcgaccatgtttgactctttggaggccatgcatcgttgtaccagtggtagagacatcaccgactcactcacagaggtgtaccttctaggtgagatttttgacattgtctgcggcgagggcagtgcacgcaccgaacgtcatgagttgtttggtcactggagggagaggctcacctatgctgggctaactcaagtgtggttcgacccccatgaggttgacacgctaaaagaccagttgatccatgtgacattcttatttggttctgggttcaacattctagtg

SEQ ID NO: 31505 - DNA, 286 bp, Zea mays
  Clone ID: LIB3182-001-P1-M1-A2
gtttgctactactttggaacaggagtacaagagtgatatctttggagagcgaggcatcttgctgggtgctgtccatggtatcgtggaggctctgtttaggaggtacacagaacaaggaatggatgaagagtcggcctacaaaaacactgtcgagggcataactgggatcatctcgaaaaccatctcaaagaaagggatgcttgaagtgtacaactctttgagcgaggaaggcaaaaggagttcaacaaggcttatagcgcatcgttttacccatgcatggatatac

SEQ ID NO: 31506 - DNA, 299 bp, Zea mays
  Clone ID: LIB3182-001-P1-M1-A4
gtgaagtgtgagtcacaagaccttttgttgaacaagcttattggagaagattttgtaactgaagaagaagggcacatactgcgttggcggcggaatattgctagcagcaaaactcgcaccatgaagcgtgcaggaattgctgtctacaaccgagcatcttcactcgaaacactaattgcatatctatacctcacaaataccaaacggttggaacaactgatgtttcaattgggcttcacacgtggtgcctcatcacagcatattgcagacgagctgcgcttaagtttccagaaaacaac

SEQ ID NO: 31507 - DNA, 229 bp, Zea mays
  Clone ID: LIB3182-001-P1-M1-A5
ggtaccccttgaaggaccgggtcggaatttccgggttggaccaacccttccgataggtttagagggtaaggggtttttttaaaaaaactaactttactttggtttggatattatttgtttacttttttttttcgttttctatagccaattcatgggggttttctttttaatgtttggaattacaaaattgttgttttatttaatattttttttttttctaacttttttt

SEQ ID NO: 31508 - DNA, 139 bp, Zea mays
  Clone ID: LIB3182-001-P1-M1-A7
atggtatatcgagcgtgtctagtttataacccgaaccccaacattggcctgatgctgatggcatgtagcccatagctccgcagttggattaaccggaggcggcggcaactactgtgaaaactacatcgaatgctagctt

SEQ ID NO: 31509 - DNA, 204 bp, Zea mays
  Clone ID: LIB3182-001-P1-M1-A8
ttgaagtttggtgcctaacactcagcagtcgcggtgattttgttgtaacaggttcacatgatcgttccattcggcgttgggatcgtactgaagaacaactgttcattgaggaagagaaggagaaaagattggaagaaacctttgaggctgatttagaaaacgataatgactatagatatgggcagaaagatgatgcccttgatg

SEQ ID NO: 31510 - DNA, 294 bp, Zea mays
  Clone ID: LIB3182-001-P1-M1-B1
ctactatactatactctaggaagcaaggacaccaccgccatggcagccaagatgcttgcattgttcgctctcctagctctttgtgcaagcgccactagtgcgacccatattccagggcacttgccaccagtcatgccattgggtaccatgaacccatgcatgcagtactgcatgatgcaacaggggcttgccagcttgatggcgtgtccgtccctgatgctgcagcaactgttggccttaccgcttcagacgatgccagtgatgatgccacagatgatgacgcctaacatgatg

SEQ ID NO: 31511 - DNA, 325 bp, Zea mays
  Clone ID: LIB3182-001-P1-M1-B10
attcagaaacacaccaagcgaagcgcactagcaacaacctaacaacaatggctaccaagatattagccctccttgcgcttcttgcccttttagtgagcgcaacaaatgcgttcattattccacagtgctcacttgctcctagtgccattattccacagttccttccaccagttacttcaatgggcttcgaacattcagccgtgcaagcctacaggctacaactagcgcttgcggcgagcgtcttacaacaaccaattgcccaattgcaacaacaatccttggcacatctaaacctacaaaccatcgcaacgcaacagcaacaaca

SEQ ID NO: 31512 - DNA, 284 bp, Zea mays
  Clone ID: LIB3182-001-P1-M1-B11
cggacgcgtgggcgaaccttcttgtgcatcttcacgccgtggaaaattcagaaccgcaaatctccgaccgagcagctgaaaagcgtcgagctgacgcgcttggtgccttgcctgctcgccgcatggcagatcctggaggtgagctgcaggagctccggcaaggttcggcggctcgcggaggtgacgacggtccgctacgcgctgtacgccatgaaccgcaagctcggccccggggccccgccggcgctgcacgttgagggctgaagggacggttaggagcccgt

SEQ ID NO: 31513 - DNA, 350 bp, Zea mays
  Clone ID: LIB3182-001-P1-M1-B12
cacaaaacatcaaggcacaacaactacaacaacttgtgctaggaaaccttgctgcctactctcagcaacagcagtttcttccattcaaccaactggctgcattgaactctgctgcttatttgcaacaacaactaccattcagtcagctagctgctgcctacccccagcaatttcttccattcaaccaactggcagcattgaactctgctgcttatttacaacagcaacagctaccaccattcagccagctagctgatgtgagccctgttgccttcttgacacaacaacagttgttgccgttctacctgcacgctgcgcctaacgcttgcaccctcttacaactgcaacaa

SEQ ID NO: 31514 - DNA, 179 bp, Zea mays
  Clone ID: LIB3182-001-P1-M1-B3
tcgggtcccacttggaacctaggaagggccattgtggacccaccattgccggccaaatattttggcctcctaagcttcttggtctttctgcaaggggttgttacgggagcctttttccgaaatggttggaaggttctataaccttccttatttccccgtaacttttaacaagggggttt

SEQ ID NO: 31515 - DNA, 228 bp, Zea mays
  unsure at all n locations
  Clone ID: LIB3182-001-P1-M1-B4
cagaaccacaccaagcgaagcacattagcaacaacctaacaacaatggctaccaagatattatccctccttgcgcttcttgcgcttttggggagcgcaacaaatgcgttcattattccacaatgctcacttgctccaagttccattattacacagttcctnccaccagttacttcaatgggcttcgaacacccagctgtgcaagcctataggctacaacaagcaattg

SEQ ID NO: 31516 - DNA, 300 bp, Zea mays
  unsure at all n locations
  Clone ID: LIB3182-001-P1-M1-B5
gcgaaaattgaggggggggggggggcaaatccagatccaaatgccgagggccctgatctggcggnggggcagcggctgacccacaggccgacacgaagagcaagctggtgaaactggtggtcatggtgtgcgaggggctgcggttcaacaccgtgtcccgcacggtggacgcggggttcaacagccagcacggggtgaccttgaccgtgacgcaggggaagcaggtgcagaagtgggacaggatctccaaggcggccttcgagtgggctgaccaccccaccggtgtgatccccgacatgc

SEQ ID NO: 31517 - DNA, 307 bp, Zea mays
  Clone ID: LIB3182-001-P1-M1-B6
gcggacgggtcgttcataacgtgggacgacctcagaaccccgtccgccgccgccgtgcagggcggcgtgaaggcggccagcgggggaggcgcccgcgagctggacacgatcgtggtggcgcacgacgggacggggcactcgcgcaccgtgcagggcgcagtcgacatggtgcccgccggaaacagccgccgcgtcaagatcctcgtcaggcccgcgtgtcagggagaggtgcggtgccgatcacaagcgtcggtcgctatggcatggcgcgcgacgtgatcacgtgacgcaggctcgcatgccgtcg

SEQ ID NO: 31518 - DNA, 78 bp, Zea mays
  Clone ID: LIB3182-001-P1-M1-B7
agaatgccacgaaatagctgttgtatagtggcaggtaaacaaagttgactggacgccggtttacaacaagccaactga

SEQ ID NO: 31519 - DNA, 266 bp, Zea mays
  Clone ID: LIB3182-001-P1-M1-B8
gtcagcctagcaattagctcatcgactccagattggagaactcgacaccatgaaggtgctgatcgttgcccttgctctcctggcgctcgctgcgagcgccgcctccagtacaagcggcggctgtggctgccagacaccaccgtttcatctaccgcctccgttctatatgccgcctccgttctatctgccgccgcagcagcagccgcagccatggcaataccccactcaaccaccgcagctaagcccgtgccagcagttcggatcct

SEQ ID NO: 31520 - DNA, 95 bp, Zea mays
  Clone ID: LIB3182-001-P1-M1-B9
gtgaggcttactaatgacctctttcactatgcgagcatatatgactactgggaggccatgcattgttgacccatgtgttgaggcgacagcgactg

SEQ ID NO: 31521 - DNA, 294 bp, Zea mays
  Clone ID: LIB3182-001-P1-M1-C1
gcgaaccttgctgcttacctccagcaacaacagtttcttccattcaatcaactagatggggtgaaccctgctatctacttgcaggcacaacagctactaccatttaaccaacttgtcgggagcccttatgccttcttactgcaacaacagcttctaccattccatctgcaagctgtggcaaacattgctgctttcttgagacaacaacatttgttgccattttacccacaggttgtgggaaacattaatgccttcttgcaacagcaacaattgctaccattctacccacagaat

SEQ ID NO: 31522 - DNA, 277 bp, Zea mays
  Clone ID: LIB3182-001-P1-M1-C10
cgtcgtcagtgtcgtgtactcgttttcccttccaaggcacccgttgcgagggcggaggcgccgatggccggggcgggggcgggtgcgggagcgggggcgctggccgggctcgcagcgtgcgcgacgctggcgtgcaacgtcgcaggcgccgtgctctttcttctcagccaagacgacgagcggctgcggcgcgggtgtgcggcgaggttgggcgctggcggcgtcgcgtcgcaaccggtggaggagtgcggggatgaagaggcgctcgcgccggacg

SEQ ID NO: 31523 - DNA, 345 bp, Zea mays
  Clone ID: LIB3182-001-P1-M1-C11
ctccaccctcctcgccgcctcactccctctgaggtcgcagatccgtccggttagacgaagccgcccgcacccatggcctccggtgagctcgcctgcacctacgccgccctcatcctcagcgacgacggcatcgccatcaccgccgagaagatcgccaccatcgtgaaggcggccaacatcaagctcgagtcctactggccggcgcttttcgctaagctcctggagaagcgcagcgttgaggatctaatcctctccgttggatctggtggtggcgctgctccagttgctgcttccgccccagctgggggtgctgcagctgctgctgcccctgctgcagaggagaag

SEQ ID NO: 31524 - DNA, 242 bp, Zea mays
  Clone ID: LIB3182-001-P1-M1-C12
gttaaacctcctggacgcctgactgcctatgatagcgcatatccttccgggtagactaatcctagctgaccaatgggcttgagtgagttcagctgcacctatgcaactctcattctaagctacgactgattccttatcatcagcgacaagatcgccaccttcctgaagtctgtcatcatcacatttgagtactacttgccggctctaattcgtaggttcatctagaatctatagccctttag

SEQ ID NO: 31525 - DNA, 309 bp, Zea mays
  Clone ID: LIB3182-001-P1-M1-C4
gtcttcaaaccattagctctatctactccagagcgcataagaacccgatcgacaccatgagggtgttgctcgttgccctcgctctcctggctctcgctgcgagcgccaccttcacgcatacaagcggcggctgcggctgtcagccaccgtcgccggttcatctaccgacgccggtgcatctgccaccttcggttcacctgccacctccggtgcatctcccaccgacggaccacctgccgccgccggtccacctgtcaccgtcgggccatgtgccgtcgccggttcatatgacgtcgtcaccatgccact

SEQ ID NO: 31526 - DNA, 216 bp, Zea mays
  Clone ID: LIB3182-001-P1-M1-C8
gcattcagaaacacaccaagcgaagcgcactagcaacaacctaacaacaatggctaccaagatattagccctccttgcgcttcttgcccttttagtgagcgcaacaaatgcgttcattattccacagtgctcacttgctcctagtgccattattccacagttcctcccaccagttacttcaatgggcttcgaacatccagccgtgcaagcctacag

SEQ ID NO: 31527 - DNA, 187 bp, Zea mays
  Clone ID: LIB3182-001-P1-M1-C9
accacgcgtccgcagcaaagcggcagtgcgtagagaggatcgtcgcacagaacagcatgaagatggtcatcgttctcgtcgtgtgcctggctctgtcagctgccagcgcctctgcaatgcagatgccctgcccctgcgcggggctgcagggcttgtacggcgcttgcgcccgcctgacgacgatgat

SEQ ID NO: 31528 - DNA, 305 bp, Zea mays
  Clone ID: LIB3182-001-P1-M1-D1
gctcgatcggccatcatctgactgtgcaagcacgagagggggatacagcggattcataaaccgtcagagtgttaggacaagatggtggccaatggtgatgcacctgctagagggagcgcggcggcagctgcaagcctgcgtaggcgtaggaccacaagtggtgctgctgctggtggaggcggtgccagctcaatgctccaattctacactgacgagactgctggccgcaaaatgtcaccaaacactgttctgatcatgagtattgggttcgtagccgtcgttgctgtgctccatgtattcgggaa

SEQ ID NO: 31529 - DNA, 289 bp, Zea mays
  Clone ID: LIB3182-001-P1-M1-D10
gcagcccgacggcgacgccctactgctcgcctcagtgccagtcgttgcggcagcagtgttgccagcagctcaggcaggtggagccgcagcaccggtaccaggcgatcttcggcttggtcctccagtccatcctgcagcagcagccgcaaagcggccaggtcgcggggctgttggcggcgcagatagcgcagcaactgacggcgatgtgcggcctgcagcagccgacttcatgcccctacgctgcttgcggcggtgtcccccactggagaaactatgtgctgtagtatag

SEQ ID NO: 31530 - DNA, 91 bp, Zea mays
  Clone ID: LIB3182-001-P1-M1-D3
gaccaacttgcaccattgaagggccaatttggtcccaacaatggcagccaaaaaattttgcctccttatgctccttgggattttgggaagg

SEQ ID NO: 31531 - DNA, 349 bp, Zea mays
  unsure at all n locations
  Clone ID: LIB3182-001-P1-M1-D6
gaagaaagcatgattgatgagaaagaaaatgatgaatggatccgtgagcttgctacgagcaattctgttcttgagacactgaatttctttcagacagatctcagggcatccccagagtatcttacccttcttgtgcgcaactgtcaaaggctgaaaaccttgaagattagtgagtgtttcatgcctgatctggttagtttgttccgaactgcacaaacactacaagaattcgctggtggttcctttgaagatcagggtcaacctgtggcaggtagaaattatgagaactactattttcctcctttactgcaccgcttgagtttgctctacatgggaacanatgagatgc

SEQ ID NO: 31532 - DNA, 110 bp, Zea mays
  Clone ID: LIB3182-001-P1-M1-D7
gcttattagttgtaattcaataataaagttttttggatgatgtatgtaacttcttatttctggttggccacatacatcatccaaaaataagaagttacatttccagattc

SEQ ID NO: 31533 - DNA, 281 bp, Zea mays
  Clone ID: LIB3182-001-P1-M1-D8
ttctggaactgaaggccatggctgataggatcattaacatgaggcaacaactatttaatgcgctgaaatccagaggaacccctggtgattggagccatatcattaagcaaattgggatgtttactttcactgggctgaatagcgaacaagtcgcattcatgaggcaggaataccacatttatatgacatctgatgggaggatcagcatggccggtttgagcatgaggactgtgccccatcttgcagatgccatacacgctgcagttactcaactgaaatga

SEQ ID NO: 31534 - DNA, 319 bp, Zea mays
  Clone ID: LIB3182-001-P1-M1-E1
gtgacttctgtctgcgtctcgctctccggcgactggtgggccgccgccaccctaagccagttgcggaggtttacattggtctcttcgccggcgacgagcacccaccaggagtcttgacaagtttttccaatggaccaagtaccgaatggaaggcataaggtttcttttgcgaagccaagagtagttgtgctttcagattctgactctgactctgaaggttttgtagaagagctaactcctgttcactcaaagtcaaacgggaaggcttcatctgcgagcctaaaaaactgtggaaaggcttcagccctttctaaagtga

SEQ ID NO: 31535 - DNA, 71 bp, Zea mays
  Clone ID: LIB3182-001-P1-M1-E10
gagttatagttcaataataaagttttttatctgatgtttgtggcttcccagaaataagaaagtacatttct

SEQ ID NO: 31536 - DNA, 351 bp, Zea mays
  unsure at all n locations
  Clone ID: LIB3182-001-P1-M1-E11
attcagaaacacaccaagcgaagcgcactagcaacaacctaacaacaatggctaccaagatattagccctccttgcgcttcttgcccttttagtgagcgcaacaaatgcgttcattattccacagtgctcacttgctcctagtgccattattccacagttcctcccaccagttacttcaatgggcttcgaacatccagccgtgcaagcctacaggctacaactagcgcttgcggcgagcgtcttacaacaaccaattgcccaattgcaacaacaatccttggcacatctaaacctacanaccatcgcaacgcaacagcaacaacagtttctgccatcactgagccacctag

SEQ ID NO: 31537 - DNA, 352 bp, Zea mays
  Clone ID: LIB3182-001-P1-M1-E12
caactagcaacatagaaagcacaatagtgtaccaacaatggcagccaaaatattttgcttccttatgctccttggtctttctgcaagtgttgctaccgcaaccattttcccacaatgctcacaagctcctatagcttcccttcttcccccatacctctcaccagcggtgtcttcaatgtgtgaaaacccaattgttcaaccctacaggatccaacaggcaatcgcaacaggcatcttaccattatcacccttgttcctccaacaaccgtcagccctattacagcagttacctttggtccatttggtggcacaaaacatcagggcacaacaactacaacaacttgtgctagca

SEQ ID NO: 31538 - DNA, 326 bp, Zea mays
  Clone ID: LIB3182-001-P1-M1-E5
atagggaaaggtggtacccctggcgggaccgggcccgaatttccggggtggaccaacccttccgttgggttgggcccggttcctttttggttacaccaacatttgttgccgttctaccaacacgttgggcttaacgttgggaccctttaacaactgcaacagtggttgccattaaaccaacttgcttggacaaacccaggagtgtcctaccaacaacccattattggtggtgcccttttttagatttgttatgagttatagttgaataataaagttttttgtctgaagtttgtggcttcccagaattaagaatgtacatttctaat

SEQ ID NO: 31539 - DNA, 147 bp, Zea mays
  Clone ID: LIB3182-001-P1-M1-E6
actaaatcaaattctggacgatcttgtcagatgattgtgttactaggtagaggcaatgtgcgacctcaagtcaggttagggcaaatacaagagcgctctcgctactgtaaaccttgtaaccttatctggcacttgttttgttttact

SEQ ID NO: 31540 - DNA, 332 bp, Zea mays
  unsure at all n locations
  Clone ID: LIB3182-001-P1-M1-E7
caactagcaacatagaaagcacaatagtgtaccaacaatggcagccaaaatattttgcttccttatgctccttggtctttctgcaagtgctgctaccgcaaccattttcccacaatgctcacaagctcctatagcttcctttcttcccccatacctctcaccagcggtgtcttcagtatgtgaaaacccaattcttcaaccctacaggatccaacaggcaatcgcagcaagcatcttacctttatcacccttgttccttcaacaaccgtcagccctattacagcagntacctttggtgcatttgttggcacaaaacatcagggcacaacaac

SEQ ID NO: 31541 - DNA, 299 bp, Zea mays
  Clone ID: LIB3182-001-P1-M1-E8
cagaccattagctttatctactccagagcgcagaagaacccgatcgacaccatgagggtgttgctcgttgccctcgctttcctggctttcgttgcgagcgccacctccacgcatacaagcggcggttgcggttgccagccaccgccgccggttcatctaccgccgccggtgcatttgccacctccggttcacctgccacctccggtgcatctcccaccgccggtccacctgccgccgccggtccacctgccaccgccggtccatgtgccgccgccggttcatctgccgccgccaccatg

SEQ ID NO: 31542 - DNA, 348 bp, Zea mays
  unsure at all n locations
  Clone ID: LIB3182-001-P1-M1-E9
gcaacatagaaagcacaatagtgtaccaacaatggcagctaaaatattttgcctgcttatgctccttggtctttctgcaagtgctgctacggcgaccatttttccacaatgctcacaagctgctatagcttcccttcttcccccgtacctctcaccaacggtgtcttcggtatgtgaaaacccaattcttcaaccctacaggatccaacaggcaatcgcagctggcatcttacctttatcacccttgttcctccaacaatcatcagccctattacagcagttacctttggtgcatttattggcacanaacatcagggcacaacaactacaacaacttgtgctagcaaa

SEQ ID NO: 31543 - DNA, 340 bp, Zea mays
  Clone ID: LIB3182-001-P1-M1-F11
atagaaagcacaatagtgtaccaacaatggcagccaaaatattttgcctccttatgctccttggtctttctgcaagtgctgctacggcgaccattttcccgaaatgctcgcaagctcctatagcttcccttcttcccccgtacctctcaccagcggtgtcttcggtatgtgaaaacccaattcttcaaccctacaggatccaacaggcaatcacagctggcatcttacctttatcacccttgttcctccaacaatcatcagccctattacatcagttacctttggtgcatttattggcacaaaacatcagggcacaacaactacaacaacttgtgctagc

SEQ ID NO: 31544 - DNA, 307 bp, Zea mays
  Clone ID: LIB3182-001-P1-M1-F12
gtaggattgcattgtcgtgtatagaaatgccacatcgtacaagaggccatgctagccagcattttacaggtattaacatttaccctgcaacaaccatatgctatattgcaacaggcatccttagtgcatgtgtatctacaaagaatcgctggacaacaactacaacaactgttgctgccaacaatcaatcaagctgtttgcgcgaaccttgctgcctacctccatgaacaacagttttttccattgaatcaactagatggtgtgtaccctgctatctactttgatgcacaacatctactaccattta

SEQ ID NO: 31545 - DNA, 94 bp, Zea mays
  Clone ID: LIB3182-001-P1-M1-F3
gcagttttaactactttagcggtggctcaaatctaaaaaattgtcatgaattcctaaggcagcagggcagccctttgggaatgccttttttcca

SEQ ID NO: 31546 - DNA, 349 bp, Zea mays
  Clone ID: LIB3182-001-P1-M1-F4
ccaacaggcaacatagaaggtggaatacagtagcaacaatagagcaacaatggcggccaagatattttccatccttatgctccttgctctttctgcatgtgttgctaacgcgaccatttttcctcaatactcacaagctcctatagctgcccttcttcccccataccttccatcaatgaccgcttcagtatgtgaaaacccagcccttcaaccctacaggctccaacaagcaatcgcaacaagcaacttacctttatcacccctgttctttcaacaatcgccagccctatctttggtgcagtcattggtacaaaccatcagggcacaacagctgcagcaactcgtgcta

SEQ ID NO: 31547 - DNA, 341 bp, Zea mays
  Clone ID: LIB3182-001-P1-M1-F5
ggaaaggtggttcccctggcgggtccgggcccggatttccggggtggaccaacccttccgatttttaatggaaggcggccgttctttttaaacaaacctaccttacgcacgcatgcatccaaataaatattttttggtgtgagctaactaaatttaattgactggcggtttacaaccaacggactggctaaacaatgcctgtacccacctaaattaattggctggaaatacatctttcttcagctggctgaataaataacaggaaggcacggaccgaccttcctaacaaatagttagcctgaatgaataatgaatggcaccctctatggacccattaatta

SEQ ID NO: 31548 - DNA, 316 bp, Zea mays
  unsure at all n locations
  Clone ID: LIB3182-001-P1-M1-F9
tccacatcgcaggagctcaaggccaccaccagccacatcaagcagttctcgcaggacctcaccaagggcttcacgtgcacccagagtcgcgccaatctcgcggcgggggagccaccgnccaccgcaccctcggcaccgacaccgccctcgaggcccacacccagcgccgccgctgcgcgtagctcgaccgcaccaagtccgatgcgcaaacctgttgttttctaggcggcggngatggcatgctcgagacggcgtatggcgtgccaactacgaggaaacctaggctacgacaatgatcgttgtccacgaacgcgag

SEQ ID NO: 31549 - DNA, 262 bp, Zea mays
  unsure at all n locations
  Clone ID: LIB3182-001-P1-M1-G1
ccttgctttcctggcgctcgctgcgagcgccgcctncagtacaagcggcggctgtggctgccagacaccaccgtttcatctaccgcctccgttctatatgccgcctccgttctatctgccgccgcagcagcagccgcagccatggcaataccccactcaaccaccgcagctaagcccgtgccagcaagtcggatcctgcggcgtcggcagcgtcggcagcccgttcctgggccagtgcgtcgagttcctgaggcaccagtgc

SEQ ID NO: 31550 - DNA, 249 bp, Zea mays
  unsure at all n locations
  Clone ID: LIB3182-001-P1-M1-G10
gcttccgcttgtagtgggagtgggagtggccgagtgggagaagggaagagatgagcagcagtgaggctagcacgcaagaccatggcgtgccggcgctcgaggcgcaggatagcacggatgaccatggcgtgcccgcgctcgaggcgcccacgcccgaggctacggacaaggtactggccgccatggcgcgactggcgcgacgtcngaagctggagctaaagcggctggggcgcactgcacccgttgggg

SEQ ID NO: 31551 - DNA, 355 bp, Zea mays
  unsure at all n locations
  Clone ID: LIB3182-001-P1-M1-G11
ataccaactagcaacatacatagtgaagtacactagcaacatcttagcaccaatgggagccaagatttttgccctccttgccctccttgctctttcagcaagcgctgctacctcgacttttattccacaatgctcacaacaatacctctctccggcgacagccgtgggatttcaatacccaactatacaatcctacatggtacaagaggccatccaagcaagcatcttacggtcattagcattaaccctccaacaaccatatgctctattgcaacagccatccttagtgcatctgtatctncaaaagatcgcggcacaacaactacaacaacagttgctaccaacaatcaatcaa

SEQ ID NO: 31552 - DNA, 322 bp, Zea mays
  Clone ID: LIB3182-001-P1-M1-G12
tgatgatactgagcttttgtctgaggatgtagcatcggaaccatttgagccatcaccttttattccaaaggatattgatgatgatgatgaggacgtgatatcagggagtcaacaagcaccattagataattatggcttagtgaccagtgaaaaagagagcactactagagaaaataatgttgcaaagattaaagtagtggtaaggaaaagacctttgaacagaaaggagctatctcgaaaggaagaagacatcataaccgtgcatgattcatcatgtctgacagcatacgagcctgatcttgaggtagatttgacagcttat

SEQ ID NO: 31553 - DNA, 320 bp, Zea mays
  Clone ID: LIB3182-001-P1-M1-G4
actagctgcattgaactctgcttcttatttgcaacaacaacaactaccattcagccagctacctgctgcctacccccagcaatttcttccattcaaccaactggcagcattgaactctcctgcttatttacagcagcaacaactactaccattcagccagctagctggtgtgagccctgctaccttcttgatacaaccacagttgttgccgttctaccagcacgctgcgcctaacgctggcaccctcttacaactgcaacaattgctgccattcaaccaacttgctttgacaaacccagcagcgttctaccaacaaccca

SEQ ID NO: 31554 - DNA, 336 bp, Zea mays
  Clone ID: LIB3182-001-P1-M1-G5
tggcaccataaaaggcccattggtgtcccaacattggcagccaaaatatttggcttccttatgctcctgggcctttctgcaagggctgttaccgaaaccattttcccacaatgctcacaagctcctatagcttcctttcttcccccatacctttaaccagcggtgtcttcagtatgtgaaaacccaattcttcaaccctacaggatccaacaggcaatcgcagcaggcatcttaccttaatcacccttgttcctccaacaaccgtcagccctattacagcagttacctttggtgcatttgttggcacaaaacatcaaggcacaacaactacaacaa

SEQ ID NO: 31555 - DNA, 233 bp, Zea mays
  Clone ID: LIB3182-001-P1-M1-G7
ctgcccgggagctatacgctcggccgttttctgcatcaacggtggcaggcggagcgaccgaacacgcccgtcgacgccctactcccacctgcccccgtcttcgttgccggcgacgagcacccactacaccagattaacatcctataccatggcctctctgccttgttcacaaataaagctaagcaaagtacttgtcaggaggaagctttatgagagtggactgaccaaatttg

SEQ ID NO: 31556 - DNA, 215 bp, Zea mays
  Clone ID: LIB3182-001-P1-M1-G8
ttctaccagtaccagtaccagttgcccagttaccgaaccaacccctgtggcgtttccgttgccattccgccctactactgattcatgatatttgggaaatctcctctatccatccctctctatctatatatgtaataatgcagtaagacgacacacattatcatgtgtggtatgaccaataatatatgcatcataataaagttttggttttaagg

SEQ ID NO: 31557 - DNA, 335 bp, Zea mays
  Clone ID: LIB3182-001-P1-M1-G9
attttcagcattcagaaacacaccaagcgaagcgcactagcaacaacctaacaacaatggctaccaagatattagccctccttgcgcttcttgcccttttagtgagcgcaacaaatgcgttcattattccacagtgctcacttgctcctagtgccattattccacagttcctcccaccagttacttcaatgggcttcgaacatccagccgtgcaagcctacaggctacaactagcgcttgcggcgagcgtcttacaacaaccaattgcccaaatgcaacaacaatccttggcacatctaaacctacaaaccatcgcaacgcaacagcaacaacag

SEQ ID NO: 31558 - DNA, 136 bp, Zea mays
  Clone ID: LIB3182-001-P1-M1-H1
ccgaatccgacgctccatcgagtgtgtgcggtggcggcgggaggagacgaaagagaaatatgcaggcggtggcacgggcggcgcgtgggctcgcggctgcggcggtggcacgggcggcgcgtgggctcgcggctgc

SEQ ID NO: 31559 - DNA, 180 bp, Zea mays
  Clone ID: LIB3182-001-P1-M1-H11
cggacgatacatcatgatagaacggacattagtgtaccaacacagccagcaaaatattcagcttctaatgctcaacgactcatgaagcagggtcgataccgaaactactttactagactgctgaactaatcgaactgacactattgatcgaggatacctttcacctaccttttcaagaac

SEQ ID NO: 31560 - DNA, 338 bp, Zea mays
  Clone ID: LIB3182-001-P1-M1-H12
caactagcaacatagaaagcacaatagtgtaccaacaatggcagccaaaatattttgcttccttatgctccttggtctttctgcaagtgctgctaccgcaaccattttcccacaatgctcacaagctcctatagcttcctttctttccccatacctctcaccagcggtgtcttcagtatgtgaaaacccaattcttcaaccctacaggatccaacaggcaatcgcagcaggcatcttacctttattacccttgtttctccaacaaccggtagccctattacagcagttacctttggtgcatttgtggcacaaaacatcaaggcacaacaactacaaca

SEQ ID NO: 31561 - DNA, 206 bp, Zea mays
  Clone ID: LIB3182-001-P1-M1-H4
gcacataaaagcccatagtgtccaacatgcagccaaaaatttgcttcttagctcttggcttttgcagtgtgtaccgaccatttccacatgtacagctctatgttccttttcccataccttacaggggtttaatgggaaaccaatgtaacctcagaccaacagaatgaacagatttacattataccttgtctcaaaccgtagcctat

SEQ ID NO: 31562 - DNA, 401 bp, Zea mays
  Clone ID: LIB3182-001-P1-M1-H5
cgacttttgggaaaggtggtaccccttgcaggacccgtcccgaaattccgggttggcccaacccttccggaattttaacggcctattggggggatgttggaccaataaaatcattctttgatgcaaacttggccctcactgagcagccttccaagtttgatttttatgatccaaaaacacctttcttcactgcaccccgatgcttgcctccgacgcaattggacaagtgcaagatgaaagatgcattaatctcagatggttgcttactgagagaatgcaacatcgagcattctgtgattggagtctgctaacgtgtaagctctggatgtgaactcaaggactcaccgatgatgggagcggacacctatgaaactgaagaagaagcttcaaagctactgtta

SEQ ID NO: 31563 - DNA, 303 bp, Zea mays
  Clone ID: LIB3182-001-P1-M1-H8
caattatggtgatgtagagaacatccttgttgaaatgggaacatactttcaagtccaggatgactatctggattgttatggtgatcctgaatttatcggcaagattggaacggacattgaagattacaagtgctcatggctagttgtgcaagcccttgagcgtgctgatgagagccaaaagcgcattctatttgaaaattatggcaagaaagatccagcctgtgtggcaaaagtgaagaacctctacaaagaacttgacctagaggcggtatttcaggagtacgagaatgagagctacaagaa

SEQ ID NO: 31564 - DNA, 327 bp, Zea mays
  Clone ID: LIB3182-002-P1-M1-A10
ttttgagcattcagaaacacaccaagcgaagcgcactagcaacaacctaacaacaatggctaccaagatattatccctccttgcgcttcttgcgctttttgcgagcgcaacaaatgcgtccattattccacaatgctcacttgctcctagttccattattccacagttcctcccaccagttacttcaatggccttcgaacacccagctgtgcaagcctataggctacaacaagcgattgcggcgagcgtcttacaacaaccaattgcccaattgcaacaacaatccttggcacatctaacaatacaaaccatcgcaacgcaacagca

SEQ ID NO: 31565 - DNA, 325 bp, Zea mays
  Clone ID: LIB3182-002-P1-M1-A12
ggttggcttaattgctgcgaatgacgggatcatccttcgcaaccatatctcacggatccttcggtgccactttaagggcaaaccttactatgctgatctccttgatttgttcaatgaggttgagttcaagacagcttcaggtcagcttctggaccttatcactacccatgagggagaaaaagatctaacaaagtataacataacagttcacggtcgaattgttcaatacaagacagcctattattcattttatctgccggttgcatgtgccctgctgctctctggcgagaatttggacaattatggtgatgtagagaacatcctt

SEQ ID NO: 31566 - DNA, 62 bp, Zea mays
  Clone ID: LIB3182-002-P1-M1-A3
ccctgccttccacctcattacttttttattgtggcaccttaaatcaaatcaattgcccgcgg

SEQ ID NO: 31567 - DNA, 240 bp, Zea mays
  Clone ID: LIB3182-002-P1-M1-A5
tggaccaacccttccgaacaataacattcatcaactcaagagggaaaacgagcccgctatccacttggtggccgtccctggccgcacaccatggttacgccttggtgttggacgccactttacccatacaagtggcgtttgcgggttatagttactggcggcgaacgatttaccggcgccggtgcatatgtcacctagggttcacctgctaccttctgtgcatttcccaccgccgttcca

SEQ ID NO: 31568 - DNA, 323 bp, Zea mays
  Clone ID: LIB3182-002-P1-M1-A6
ccaccggcgacggcgaggccgaccgcactggccctcttcgtgcggatctctttcgcgtgctcgcaggcgcgtcctgggacacgggagaagagaccttggtgagtggcagcggcaggccatggaggcgctgctggtgacactgcttctactcctactatcctttaccctcgccgcatcacaatggtgcgtgtgcaggcaggacgcggcgcaggccgcgctgcataagaccatcgactacgcgtgctgttccagtgctgactgcaactccattcatgtgagcggcgcgtgctacaacctcaacaacgacccggcgcactgtttct

SEQ ID NO: 31569 - DNA, 327 bp, Zea mays
  Clone ID: LIB3182-002-P1-M1-A8
aagcacaatagtgtaccaacaatggcagctaaaatattttgcctccttatgctccttggtctttctgcaagtgctgctacggcgaccattttcccacaatgctcacaagctcctatagcttccctttttcccccgtacctttaaccaacggtgtcttcggtatgtgaaaacccaattcttcaaccctacaggatccaacaggcaatcgcagctggcatcttacctttatcacccttgttcctccaacaatcatcagccctattacagcagttacctttggtgcatttattggcacaaaacataagggcacaacaactacaacaactt

SEQ ID NO: 31570 - DNA, 329 bp, Zea mays
  Clone ID: LIB3182-002-P1-M1-B1
atctaaacctacaaaccatcgcaacgcaacagcaacaacagtttctgccatcactgagccacctagccgtggtgaaccctgtcgcctacttgcaacagcagctacttgcatccaacccacttgctctggcgaacgtagctgcataccagcaacaacaacgtctgcaacagtttatgccagcgctcagtcaactagccatggtgaaccctgtcgcctacctacaacagcaacaattgctttcatctagcccgctcgctgtgggcaatgcacctacgtacctacaacaacagttgctgcaacagattgtaccagctctgactcagctagct

SEQ ID NO: 31571 - DNA, 81 bp, Zea mays
  Clone ID: LIB3182-002-P1-M1-B12
cctttcctctctgtgcggttaaagaacaagagcggggggtttataggattcaagcatacttacacttacttgcaacgtttt

SEQ ID NO: 31572 - DNA, 334 bp, Zea mays
  Clone ID: LIB3182-002-P1-M1-B2
cgcaaaaccgcatcctctcatcagcttccttccacattcgtctcgagatctcgccccgtcgccatggacgcgatcgacagcgtggtggatcccctccgcgacttcgccaaggacagcgtccgcctcgtcaagcgctgccacaagcccgaccgcaaggagttcaccaaggtggcggcgcggacggcgatcgggttcgtcgtcatgggcttcgtcggcttcttcgttaagctcatcttcatccccatcaacaacatcatcgtcggttccggctaggcttacaggagtacagggcgactagcatgggagtagtgcaatacttttgggagcaatagat

SEQ ID NO: 31573 - DNA, 339 bp, Zea mays
  unsure at all n locations
  Clone ID: LIB3182-002-P1-M1-B4
caacaagctactcaaagtgcggtggcaatcttgacagcagcacaatacctaccatcaatgtgcggcttgtaccactcatactaccaaaataatccatgcagcagcaatgacattagtggtgtttgcaattgaagaattgtgtctacctagccgttatactcctataacggtgttaagcaataaagtaccatacattnaaaaaaaaaaaaaaataaaaaaaaaaataataaaaaaaaaaaaaaaaaaaattaaaaataaatttttaaaataattttttataataataaattataaaaaaattataaaaataaataataaataaaaagggggggccttttt

SEQ ID NO: 31574 - DNA, 334 bp, Zea mays
  Clone ID: LIB3182-002-P1-M1-B6
cagcattcagaaacacaccaagcgaagcgcactagcaacaacctaacaacaatggctaccaagatattagccctccttgcgcttcttgcccttttagtgagcgcaacaaatgcgttcattattccacagtgctcacttgctcctagtgccattattccacagttcctcccaccagttacttcaatgggcttcgaacatccagccgtgcaagcctacaggctacaactagcgcttgcggcgagcgtcttacaacaaccaattgcccaattgcaacaacaatccttggcacatctaaacctacaaaccatcgcaacgcaacagcaacaacagttct

SEQ ID NO: 31575 - DNA, 333 bp, Zea mays
  Clone ID: LIB3182-002-P1-M1-B7
ggttcagtgaagcccaatacaactacgagccagaaggctaagccagtgcaaaggccaaatgcagcaagccagaagacgtctgcctctacagaaaggagcaagcttataggtctcagaagaccttcctcagcaggtgcgcaacggccttctactggagagcgacatgctattgccagggagaattcacaattacctgtggtcgtttccaccccacggcgacctttcactgctgagagacgcccagtcacccgagatcgtgcacagaagcaagccaatgtcaccacaccacgccgaccttctacttctgaaagactccccatcaaaagagagact

SEQ ID NO: 31576 - DNA, 330 bp, Zea mays
  Clone ID: LIB3182-002-P1-M1-B9
cccacgcgtccgggccatcccggtgaagtacggcggcctgaagcgcgacggcgacaccgagttctccgcggacgacggcgaggtcgcggaggtcaccgtcaagggaagctccacggagaccatcgagatcgaagccactgaggctgatgccacgctgacatgggaccttactgtgctggggtgggaggtgaactacaaggaggagttcgtgccggcggacgagggctcctacaccatcatcgtcaggaagggcaagaagatggcgttcggcgaggaggcggtccgcaactcgttccgcaccggcgagccggtcaaggtcgtgctcaccgt

SEQ ID NO: 31577 - DNA, 334 bp, Zea mays
  Clone ID: LIB3182-002-P1-M1-C1
cacaaaacatcagggcacaacaactacaacaacttgtgctagcaaaccttgctgcctactctcagcaacagcagtttcttccattcaaccaactagctgcattgaactctgcttcttatttgcaacaacaacaactaccattcagccagctacctgttgcctacccccagcaatttcttccattcaaccaactggcagcattgaactctcctgcttatttacagcagcaacaactactaccattcagccagctagctggtgtgagccctgctaccttcttgacacaaccacagttgttgccgttctaccagcacgctgcgcctaacgctggcac

SEQ ID NO: 31578 - DNA, 330 bp, Zea mays
  Clone ID: LIB3182-002-P1-M1-C11
gtcgcacatatctactatactatactctaggaagcaaggacaccaccgccatggcagccaagatgcttgcattgttcgctctcctagctctttgtgcaagcgccactagtgcgacccatattccagggcacttgccaccagtcatgccattgggtaccatgaacccatgcatgcagtactgcatgatgcaacaggggcttgccagcttgatggcgtgtccgtccctgatgctgcagcaactgttggccttaccgcttcagacgatgccagtgatgatgccacagatgatgacgcctaacatgatgtcaccattgatgatgccgagcatga

SEQ ID NO: 31579 - DNA, 330 bp, Zea mays
  Clone ID: LIB3182-002-P1-M1-C12
gaccaacaagcaacatagaaagtggaatccagtagcaacaatagagcaacaatggcgaccaagatattttccctccttatgctccttgctctttctgcatgtgttgctaacgcgacaattttccctcaatgctcacaagctcctatagcttcccttcttcccccataccttccatcaatgatagcttcagtatgtgaaaacccagctcttcaaccctataggctccaacaagcaatcgcagcaagcaacatacctttatcacccttgtttcaacaatcgccagccctatctttggtgcagtcattggtacaaaccatcagggcacagcag

SEQ ID NO: 31580 - DNA, 329 bp, Zea mays
  Clone ID: LIB3182-002-P1-M1-C2
caaaaacacaccaagcgaagcgcactagcaacaaactaacaacaatggctaccaagagattatcccttcttgcgctacttgcgctttttgcgagcgcaacaaatgcgtgcattattccacaatgctcacttgctcctaggtccattattccacagatgctgccaccagttacttcaatggccttcgaacacccagctgtgcaagcctataggctacaacaagcgattgcggctagcgtattacaacaaccaattgcccaattgcaacaacaatccttggcacatctaacaatacaaaccatcgcaacgcaacagcaacaacagttccta

SEQ ID NO: 31581 - DNA, 330 bp, Zea mays
  Clone ID: LIB3182-002-P1-M1-C4
gtgatggctactggcagacacatcaggggctaccatatagccaacttggcaggggccctgatgcgttgttagtggaacaacatgttttaccattcgatctgcaagctgtggtaaacattgctgctttcttgagacaacagcacttgtggccattgtacgcacaggttgcgggaaacattaatgccttcttgcaacagcgacaattgctaccattctacccacagaatgtggcaaacattggtgacttcttacaacaacaacaattgctgccatttagccaacatgctttgacggatcctaccatactattgcaagcggccaccattggtg

SEQ ID NO: 31582 - DNA, 80 bp, Zea mays
  Clone ID: LIB3182-002-P1-M1-C5
attttggggaaggtgggtccgccggcgggtccgggcccgaatttccgggttggaccaacccttccggttttagatcggaa

SEQ ID NO: 31583 - DNA, 326 bp, Zea mays
  Clone ID: LIB3182-002-P1-M1-C7
attgagaccaactagcaacatagaaagcacaatagtgtaccaacaatggcagccaaaatattttgcctccttatgctccttggtctttctgcaagtgctgctacggcgaccattttcccgaaatgctcgcaagctcctatagcttcccttcttcccccgtacctctcaccagcggtgtcttcggtatgtgaaaacccaattcttcaaccctacaggatccaacaggcaatcacagctggcatcttacctttatcacccttgttcctccaacaatcatcagccctattacatcagttacctttggtgcatttattggcacaaaacat

SEQ ID NO: 31584 - DNA, 150 bp, Zea mays
  Clone ID: LIB3182-002-P1-M1-C8
ctgtagtatagccgctggctagctagctagttgagtcatttagcggcgatgattgagtaataatgtgtcacgcatcaccatgggtggcagtgtcagtgtgagcaatgacctgaatgaacaattgaaatgaaaagaaaaaagtattgttcc

SEQ ID NO: 31585 - DNA, 332 bp, Zea mays
  Clone ID: LIB3182-002-P1-M1-D1
aggaagcaagggaatcacatcgccatggcagccaagatgtttgcattgtttgcgctcctagctctttgtgcaaccgccactagtgctacccatatcccagggcacttgtcaccactactgatgccattggctaccatgaacccatggatgcagtactgcatgaagcaacagggggttgccaacttgctagcgtggccgaccctgatgctgcagcaactgttggccttaccgcttcagccgtgccagatgccaatgatgatgccaggtatgatgccaccgatgacaatgatgccgatgccgaatatgatgccatcgatgatggtgccgactat

SEQ ID NO: 31586 - DNA, 305 bp, Zea mays
  unsure at all n locations
  Clone ID: LIB3182-002-P1-M1-D10
cattagctttatctactccagagcgcagaagaacccgatcgacaccatgagggtgttgctcgttgccctcgctctcctggctctcgctgcgagcgccaccttcacgcatacaagcggcggctgcggctgccagccaccgccgccggttcatctaccgccgccggtgcatctgccaccttcggttcacctgccaccttcggtgcatcttccaccggcggtccacctggcgncgncggttcacctggcaccggcggtccatgtgccgccgccggttcatctgccggcggcaccatgccactacccta

SEQ ID NO: 31587 - DNA, 296 bp, Zea mays
  Clone ID: LIB3182-002-P1-M1-D11
gacgcgaggtatttctggaccatcgataaccagcctaacttcaagaaggtgattgctgtggtcaaccaagcagagtttgtacctcctattccgaaaaagggtgctccttctaaggagccaaacagcaacagactgcaagaaggacgcttcaaaggaggctaccaagacaaaggtggttgatgcacccacctaagaggatgcaccatatccgatgacaaacaatactctcgacttgctgccaccaagccagatggttcttgatgactgtgataggctatactcacacacacagacca

SEQ ID NO: 31588 - DNA, 327 bp, Zea mays
  Clone ID: LIB3182-002-P1-M1-D12
agctaagcccgtgccagcagttcggatcctgcggcgtcggcagcgtcggcagcccgttcctgggccagtgcgtcgagttcctgaggcaccagtgcagcccggcggcgacgccctacggctcgccacagtgccaggcgctgcagcagcagtgctgccaccagatcaggcaggtggagccgctgcaccggtaccaggcgacatacggtgtggtcctgcagtccttcctgcagcagcagccgcagggcgagctcgcggcgctgatggcggcccaggtagcgcagcagctgacggcgatgtgcggcctgcagctgcagcagccaggtccct

SEQ ID NO: 31589 - DNA, 315 bp, Zea mays
  unsure at all n locations
  Clone ID: LIB3182-002-P1-M1-D2
caacccgtcccgccgcaacaatggaaccttttgtggggataggggcttgctcacncnngtgttttggcttagggatgagtcngnntggaatannagcttttaaacttctcnntcgctgnnctgtgggtngnnaagtgaccctggannattcgganannatttgtgaacctaaatccaaatactcccttncgtggatttttgtnnatgatattgttatttgttctgaccagtnnttgcgtctccaatcttttcaactgttggtatttctggtatggtattgtttttgggttcaaaaaattaaataatttattaaat

SEQ ID NO: 31590 - DNA, 291 bp, Zea mays
  Clone ID: LIB3182-002-P1-M1-D3
atttggtggcattttacccacagggtgggggaaacattaatggcttcttgcaacaacaacaattggttccattctacccacagaatgtggcaaacattggtggctttttaccacaaccaccattggtggcatttaacccacatgctttgaccaattcttacaacttattggaaccggccaccattggtgggggcattttcttgaatttttattaattataccggaataattaaggtcttatgcttgtttttgccaacttttaattattaaggatttgagatctattttttt

SEQ ID NO: 31591 - DNA, 335 bp, Zea mays
  Clone ID: LIB3182-002-P1-M1-D4
ggagccaaggcggcagccgtggcgactatcgcctccgcgatccccaccctggccagcgtgcggatgctgccatgggccaaggccaacatcaaccccaccggccaggcgctcatcgtctccacggtggctgggatggcctacttcatcgccgccgacaagaagatcctgtcgctggcgaggcgccactcgttcgagcaagcccctgaccacctcaagaacacctccttccagggcaccggccgtccccacccggctttcttcaggccgtgagacgtggccttcgtccagagctagctacctacctctttcagttcgatcgtcgtcagtgcaaagca

SEQ ID NO: 31592 - DNA, 317 bp, Zea mays
  Clone ID: LIB3182-002-P1-M1-D6
tgaaatgaaaagaaaaaagtattgttccaataaaaaaaaaaaaaaaaaaaaaaaaaaaaaaaaaaaaaaaaaaaaaaaaaaaaaaaaaaaaaaaaaaaaaaaaaaaaaaaaaaaaaaaaaaaaaaaaaatttaaaaaaaaaaaaaaaaagggcgccccttttaaaaatacaaaatttaatttccctgcttttcaacgtaaaaattttttatatagtgccccaaaataaaaataatttccccttctttaaaaaaatcaaaattggaaaaaccttttctttccaaaatttaataacttttaaaaaaattccctttttgc

SEQ ID NO: 31593 - DNA, 328 bp, Zea mays
  Clone ID: LIB3182-002-P1-M1-D7
caagcaacatagaaagtggaatacagtagcaacaatagagcaacaatggcggccaagatattttccatccttatgctccttgctctttctgcatgtgttgctaacgcgaccatttttcctcaatactcacaagctcctatagctgcccttcttcccccataccttccatcaatgaccgcttcagtatgtgaaaacccagcccttcaaccctacaggctccaacaagcaatcgcaacaagcaacttacctttatcacccctgttctttcaacaatcgccagccctatctttggtgcagtcattggtacaaaccatcagggcacaacagc

SEQ ID NO: 31594 - DNA, 329 bp, Zea mays
  Clone ID: LIB3182-002-P1-M1-D8
atcagtaccatcaatcatgattcatcttagtagtataggcaccaaatcaaatctgcaacatcaattatctaactccaaaaaccatgaagctggtgcttgtggttcttgctttcattgctttagtatcaagtgtttcttgtacacagacaggcggctgcagctgtggtcaacaacaaagccatgagcagcaacatcatccacaacaacatcatccacaaaaacaacaacattaaccaccaccacaacatcaccagcagcagcaacaccaacaacaacaagttcacatgcaaccacaaaaacatcagcaacaacaagaagttcatgttcaa

SEQ ID NO: 31595 - DNA, 330 bp, Zea mays
  Clone ID: LIB3182-002-P1-M1-E10
cacactcgcgaactccatttcgatcccatttgaaatcaacccatcctcgtttcctccgtctagcagcctctcaccctcatggccaagatcaagatcgggatcaatgggttcggcaggatcggaaggctggtggccagggtggccctgcagagcgacgacgtcgagctcgtcgccgtgaacgaccccttcatcagcaccgattacatgacctacatgttcaagtatgacactgtgcacggacagtggaagcaccatgaggtcaaggtgaaggactccaagacccttctctttggtgagaaggaggttgctgtgtttggctgcaggaaccct

SEQ ID NO: 31596 - DNA, 330 bp, Zea mays
  Clone ID: LIB3182-002-P1-M1-E11
ccggaccatacggggaggacgtcgtgttcgtctgcaacgactggcacaccggccctctctcgtgctacctcaagagcaactaccagtcccacggcatctacagggacgcaaagaccgctttctgcatccacaacatctcctaccagggccggttcgccttctccgactacccggagctgaacctcccggagagattcaagtcgtccttcgatttcatcgacggctacgagaagcccgtggaaggccggaagatcaactggatgaaggccgggatcctcgaggccgacagggtcctcaccgtcagcccctactacgccgaggagctcatct

SEQ ID NO: 31597 - DNA, 159 bp, Zea mays
  unsure at all n locations
  Clone ID: LIB3182-002-P1-M1-E12
cggacgcgtgggtggcggaggtgttctccgtgcgcagcanttgccgccgtagaaagatattattccacctttcgaccaatttccttcccctaatcctctaatgttccccatatactcattttttatttacatcattttctacctttttttttttacctt

SEQ ID NO: 31598 - DNA, 331 bp, Zea mays
  Clone ID: LIB3182-002-P1-M1-E2
ttcttcctccggcttagggtgttcacgcctgccgcggcgaagcttctgccctccccggcgtcgggctctggtcgtcgtcggccgggaagatggctggcggcttcagggtacttcatctggtcaggccctttctggctttcttgccagaggtgcagagcgcggataggaagataccattcagagaaaaagttatctacactggtatttctctcttcatttttctggtgtgcagccagctcccactctatggcattcattcgacgactggagctgatcctttctactggatgcgtgttatcctcgcatcaaaccgtggcactgtgatggagtt

SEQ ID NO: 31599 - DNA, 260 bp, Zea mays
  Clone ID: LIB3182-002-P1-M1-E3
gtaaaatctggtaactcggaatttccgaaaacagatttgattcaattcatcaaggattttttaccaacacttgggagaggtgcttaccctttttttaggacacttcgaccggaggattagacaaggtccgatcggggtgctggggtttaagaggtaccgggtggaatagcttgaaaaatttaccatatacaacggccggaccctttagaagggccttttaggggaatggtcaagatattatggaccaggaaaggatttta

SEQ ID NO: 31600 - DNA, 336 bp, Zea mays
  Clone ID: LIB3182-002-P1-M1-E4
tagcaacatagaaagcacaatagtgtaccaacaatggcagccaaaatattttgcctccttatgctccttggtatttctgcaagtgctgctacggcgaccattttcccgcaatgctcacaagctcctatagcttcccttcttcccccgtacctctcaccagcggtgtcttcggtatgtgaaaacccaattcttcaaccctacaggatccaacaggcaatcgcagctggcatcttacctttatcacccttgttcctccaacaatcatcagccctattacagcagttacctttggtgcatttattggcacaaaacatcagggcacaacaactacaacaa

SEQ ID NO: 31601 - DNA, 337 bp, Zea mays
  Clone ID: LIB3182-002-P1-M1-E5
tttggctgtctgccctgtctgcaggtacctcgtcttcttcctggagagaaaaagcagaagacattccaaagatgtccaagatggcggaggagaaggcggcggcagtgggcggactcggaggagccggggcggcggacgcggcgcagcagcagcagctggcagcaggggaggccgcggcggcccggttgcggcccgtggagacgctgcttcgcgcggcaccgttggggctctgcgtggccgccatgaccgtcatgctccgtaaccagcagagcaacgagtacggcgccgtcgcctactccgacctgggaggcttcaagtacctcgtttacgccaacgg

SEQ ID NO: 31602 - DNA, 331 bp, Zea mays
  Clone ID: LIB3182-002-P1-M1-E6
gcatggtatggccctggactggaccagcagcatcagcgactcttgccccttatttggttggactggttgtacagtttgcatttgaacagtatgcacggcatcggaaatcaccttcttggccagtgattcctatcatcttcaagtttgtgatctgatcaatcgtacctgatatttgggagctgggacttgggattggctatcagtgtatcaagtaattctggactctattggaagcattttgaagaatctatgggcgacaactaagactgggaaatgtggaagaaaataatccagtatacaggcttcaccaactgaacagggcagctcagct

SEQ ID NO: 31603 - DNA, 329 bp, Zea mays
  Clone ID: LIB3182-002-P1-M1-E7
cgctgtggccgccacctgatgacaggcgcccaccactaccaggccaccacaaaacgcaacgcatcgcgacggctccccaaccccaacaagtctctcggccaggtctccctctccccggctctccgccttcctcttccagtccccgcgcgcgagatcgccgccccgtgtgggccctagatcccgatggcctcgcgccgccgcaccctgctcaaggtcatcatcctcggcgatagtggggttgggaagacttccttgatgaaccaatatgtgaacaagaagttcagcaatcagtacaaggctacgatcggcgcggatttcctcaccaagga

SEQ ID NO: 31604 - DNA, 319 bp, Zea mays
  Clone ID: LIB3182-002-P1-M1-E8
gtcgcatcccatcccactaccacccatctcgtcgtccgccgattcgatccggttcttccaacccagggtgagtttccggatccgtcgccgtctggtatccgtgtgctctcgtcgccgtcgccgtcgccgccgtttgactgcccccctcgcctcccgcggcgtcgggtctttggtgctgctgctgctgctgctgctgcgtgcagggcagtgatggcgacaaagaggagcgtgggcaccctcggcgaggcggatctgaaggggaagaaggtgttcgtgcgcgccgacctcaacgtcccgttcgacgatgcccagaagatca

SEQ ID NO: 31605 - DNA, 327 bp, Zea mays
  Clone ID: LIB3182-002-P1-M1-E9
attttgagcattcagaaacacaccaagcgaagcgcactagcaacgacctaacaacaatggctaccaagatattagccctccttgcgcttcttgccctttttgtgagcgcaacaaatgcgttcattattccacaatgctcacttgctcctagtgccattattccacagttcctcccaccagttacttcaatgggcttcgaacacctagctgtgcaagccaacatgcaacaacaagcgcttgcggcgagcgtcttacaacaaccaattgcccaattgcaacaacaatccttgccacatctaacaatacaagccatcacaacgcaacagc

SEQ ID NO: 31606 - DNA, 328 bp, Zea mays
  Clone ID: LIB3182-002-P1-M1-F10
caactagcaacatacatagggaagtacactagcaacatcttagcaccaatgggagccaagatttttgccctccttgccctccttgctctttcagcaagcgctgctacctcgacttttattccacaatgctcacaacaatacctctctccggcgacagccgtgggatttcaatacccaactatacaatcctacatggtacaagaggccatccaagcaagcatcttacggtcattagcattaaccctccaacaaccatatgctctattgcaacagccatccttagtgcatctgtatctccaaagaatcgcggcacaacaactacaacaac

SEQ ID NO: 31607 - DNA, 334 bp, Zea mays
  Clone ID: LIB3182-002-P1-M1-F11
aacaaaagagcaacggataaaatggacgactttgcccacaaggatagtttctctgaagtgtactatgaatactgtgtaagggtggtcaggtggctggagtgtgagggctatatctagacaaacttaacgatgaaactctttacatagtttagcttacctgccaccctgcatgagagaaagatagctagacggtatgtggatactctaatcgtggacactgtcaatctctctgtgcagctcgtcgacagcttctcggagaggatatatagcaaaaagcggccttccatgccttctggtttctgcatggatctgtggcattaaggaactgcagggt

SEQ ID NO: 31608 - DNA, 334 bp, Zea mays
  Clone ID: LIB3182-002-P1-M1-F12
cttccttatcgtctcttcctttcaccccctcgaccccgatcgaatcgctcgaacaattccctgtgcatcgatcgatctaggcttgcgcgaggatccaattccatccggctctcctttgagctcgtgatcctcggagttggaggagttcttcgcgagtctctttttgccccgatttctttttggcttatttgtgcgagctttctcaggagcagaagggaagaggcagtttgcaattccgatgcacccaggcctcaagattcaactctgaggccttatccgaggcatccgcatcgatctccgcaagaggatgggtaacgtgggaagcaacggtgga

SEQ ID NO: 31609 - DNA, 330 bp, Zea mays
  Clone ID: LIB3182-002-P1-M1-F2
gaccacactaagcttcaaacccatttccttctgcggactccacatatttcagcaatgcaccatgacgaaacatctgatctgaagattgtggccgaaaattttgaagaaaacctagagattacaggcacatccttggaggctcgtaagctggtcgttgaaatctgtgacattgtggcgacaagagcagcccggctggctgctgcggggcttgcagggatcctcatgaagatcgggagagatcacagcgtcgaggaccaacggtcagtcatcgccatcgacggaggactgttcgagcactacaccaaattccgccggtgcttggagaccaca

SEQ ID NO: 31610 - DNA, 336 bp, Zea mays
  Clone ID: LIB3182-002-P1-M1-F5
attaaaaaacacaccaagcgaagggcactagcaacaacctaacaacaatggctaccaagatattagccctccttgcgcttcttgcccttttagtgagcgcaacaaatgcgttcattattccacagtgctcacttgctcctagtgccattattccacagttcctcccaccagttacttcaatgggcttcgaacatccagccgtgcaagcctacaggctacaactagcgcttgcggcgagcgtcttacaacaaccaattgcccaattgcaacaacaatccttggcacatctaaacctacaaaccatcgcaacgcaacagcaacaacagtttttgccat

SEQ ID NO: 31611 - DNA, 337 bp, Zea mays
  Clone ID: LIB3182-002-P1-M1-F6
atttagaccaactagcaacatagaaagcacaatagtgtaccaacaatggcagccaaaatattttgcctccttatgctccttggtatttctgcaagtgctgctacggcgaccattttcccgcaatgctcacaagctcctatagcttcccttcttcccccgtacctctcaccagcggtgtcttcggtatgtgaaaacccaattcttcaaccctacaggatccaacaggcaatcgcagctggcatcttacctttatcacccttgttcctccaacaatcatcagccctattacagcagttacctttggtgcatttattggcacaaaacatcagggcacaac

SEQ ID NO: 31612 - DNA, 328 bp, Zea mays
  Clone ID: LIB3182-002-P1-M1-F7
ctcccaaccaccgccagccgtgcgctctccgcaagcgcgaccttccggccagatccgccccgtcgcgccgacgagcggtccttctgcctagtttctccgcccagcgagcggcgggttcctcggagattcccgctggccgcggggatccatttgtgactgctcgcgttgcgcctggatctggtttgggacggaggagtgaaacgcgacggtgatcgtgcgaggtgggacgccatcagtgctctgtctggggttcggactcttcttcggctgcagatctggaagggtttcgtgggatccgtcgctacggtctatcccagtcagagcacct

SEQ ID NO: 31613 - DNA, 331 bp, Zea mays
  Clone ID: LIB3182-002-P1-M1-F8
cccacgcgtccgaaacaacgaagccatgagcaggaccatcatccacaacaacatcatccacaaaaacaccaacatgaaccaccaccacaacattaccaggagcagcaacaccaacaacaacaggttcacatgcaaccacaaaaacatgagcaacaacaagaagttcatgttcaacaacaacaacaacaaccgtagcaccaacaacaacaacaacaacagcaccaacaacaacatcaatgtgaaggccaacaacaacatcaccaacaatgacaaggccatgtgcaccatcacgaacagagccatgagcaacaccaaggacagagccatgagc

SEQ ID NO: 31614 - DNA, 326 bp, Zea mays
  Clone ID: LIB3182-002-P1-M1-F9
ccaacaatcatcagccctattacaacagttacctttggtgcatttattggcacaaaacatcagggcacaacaactacaacaacttgtgctagcaaaccttgctgcctactctcagcaacagcagtttcttccattcaaccaactaggttcattgaactctgcttcttatttgcaacaacaacagctacaacagtttctgccaacgctcagtcaactagccatggtgaaccctgccgcctacgtacaacaacaacaactgctttcatctagcccgctcgctgtgggcaatgcacctacatacctgcaacaacaattgttgcaacaga

SEQ ID NO: 31615 - DNA, 337 bp, Zea mays
  Clone ID: LIB3182-002-P1-M1-G11
tgcacctacatacctgcaacaacaattgttgcaacagattgtaccagctctgactcagctagttgtggcaaaccctgctgcctacttgcaacagctgcttccattcaaccaactgactatgtcgaactctgctgcgtacctacaacagcgacaacagttacttaatccactagcagtggctaacccattggtcgctgccttcctacagcagcaacaattgctgccatacaaccagttctctttgataaaccctgtcttgtcgaggcagcaacccatcgttggaggtgccatcttttagattacatatgagatgtactcgataatggtgccctcattc

SEQ ID NO: 31616 - DNA, 263 bp, Zea mays
  Clone ID: LIB3182-002-P1-M1-G12
gaggtagatcctgcgtgtttgcaagatccggtcattctttacgggcccgttaccgccaccgcctaactccaggatccggctgcctaaacctaattcaatctgcgtggcggtacaaagcgcccaccaaaaatacccccgggttcaaccgcttgaacccctatgtgcgaattccagaaccctcagctgggtgggtagccaacagggcacaacgactctgactatgggagagaggcacactcactatggttagaggtactgcccct

SEQ ID NO: 31617 - DNA, 330 bp, Zea mays
  Clone ID: LIB3182-002-P1-M1-G2
ttcaacaagcaatcgcagcaggcggcatacctttatcgcccttgttgtgtcaacaatcgccagccctatctttggtgcagtcattggtacaaaccatcagggcacaacagctgcagcaactcgtgctacctgtgatcaaccaagtagctctggcaaacctttctccctactctccgcaacaacaatttcttccattcaaccaactgtctacactgaaccctgctgcttatttgcagcaacaactattaccatttagccagctagctactgcctactctcaacaacaacaacttcttccatttaaccaattggccgcactgaaccccgctg

SEQ ID NO: 31618 - DNA, 273 bp, Zea mays
  Clone ID: LIB3182-002-P1-M1-G3
ggcaacattaaaaggccaatgggggcccaacaatggcagccaaaatattttggctccttatgcttcttgggctttctggaagggctggttccgggaacatttttccacaatggttacaagcttctattggtttccttctttccccggaccttttaacaacgggggttttggtatttggaaacccaattctttaaccctattggatcccaccagcaattgcaggttggattttaactttattaaccttggttcttccaccattattaagccttt

SEQ ID NO: 31619 - DNA, 341 bp, Zea mays
  Clone ID: LIB3182-002-P1-M1-G5
atagaaagcacaatagtgtaccaacaatggcagccaaaatattttgcttccttatgctccttggtctttctgcaagtgttgctaccgcaaccattttcccacaatgctcacaagctcctatagcttcccttcttcccccatacctctaaccagcggtgtcttcaatgtgtgaaaacccaattgttcaaccttacaggatccaacaggcaatcgcaacaggcatcttaccattatcacccttgttcctccaacaaccgtcagccctattacagcagttacctttggtccatttggtggcacaaaacataagggcacaacaactacaacaacttgtgctagca

SEQ ID NO: 31620 - DNA, 336 bp, Zea mays
  Clone ID: LIB3182-002-P1-M1-G8
atgaaaagaaaaaagtattgttccaaattaaatttaaaaaaaaaaaaaaaaaaaaaaaaaaaaaaaaaaaaccaaattaaatttgaaaaaaccaaaaaaaaaaaaaaaaaaaattaaaaaaaaaaaaaaaaaaaaaaaaaaaaaaaaaaaaaaaaaaaaaccccaaaaaaaaaaaaaaaaaaaaaaaaaaaaaaaaaaaaatgggggggccccttttaaaggatcaaattttttcacccctttttttccaggaaaaattttttttttagggccccaaaaaaaaaataaactgccccttttttaaaaacctcggacttgaaaaaccccccccttccc

SEQ ID NO: 31621 - DNA, 329 bp, Zea mays
  Clone ID: LIB3182-002-P1-M1-G9
cgcagatgcaagctgtgaagacattgaggtcgacagaagcctctcatttctaaacagttatgtgcagcaagccttggaaaatggtgcgtccccttacattccagagagtgaacgctctggtgttataagtgtcggcagctacagaagccaagaacaacaggaaacatctgcccatactcttagatttgaggcctatgagatgcctaaaccttcgttgccactagcaacttcacaaaccagcatgtccacaccacctactgatctggttccagttccagaggcaggctactacaaggaagacaatcaaacatcaatgtctcaaccaccaa

SEQ ID NO: 31622 - DNA, 336 bp, Zea mays
  Clone ID: LIB3182-002-P1-M1-H10
gcgggtgctggtgcgggaagcctcgccagacctagcgctgccgactgccgagctgggtgcgggcgcgaggagtcgacgggaagacaagggtgaggaattatgagtgaaacagggcacactgtacaagtcactaacctctcgagcagagtatctgaaagtgatcttcatgagttcttttcgttctctggtcctattgagcatatagaacttatcagatcagaaggatacggtgccactgcttatgtgacattcaaggaacgctttgccttggaaactgcagtattgctcagtggggctactattgtggatcagccagtatgcataacctattgggga

SEQ ID NO: 31623 - DNA, 338 bp, Zea mays
  Clone ID: LIB3182-002-P1-M1-H11
gaccacgacatgccgcagctggtggaggcggatgtggagaaggcgctgtgggcccagatcggcatcttgcatggcggtggcggcctggtcggggacagcagctacggggcgcaggaggaactcgacgaggaagaggccaaggagatcgacagcgcccgcgcgcggcgccggaaggcggcctacgagatggccatcgcctcaggcggcgccagctcgctcatcctgtccaactacgcgcagctcctgtacgagatcgacaaggacatcgagagggcggagatgtacttcaagcaggcggtggccgccgagccggcggacggcgaagcgatgcggaggta

SEQ ID NO: 31624 - DNA, 159 bp, Zea mays
  unsure at all n locations
  Clone ID: LIB3182-002-P1-M1-H12
cccacgcgtncgaggcattctactagtagtagtagataatgttaccagctgatgctgatgtcgattattgttttctttcgttcattcgttggttggttctcagtcccgctctggattttgctttatgtatatatatatatactgctctccttcattcgt

SEQ ID NO: 31625 - DNA, 191 bp, Zea mays
  unsure at all n locations
  Clone ID: LIB3182-002-P1-M1-H2
cccacccgtccgaaaaaaaagaagtgtttatttataaattttaataatttatnttttaaaaaaaaataaattatatataaaaataaaataatttaaaaaaaaaaagggccgccccttcttgaggttccaagctttcttccccttgcttgcgacgtcttagctttttttttgtgtcccctaatttcatttcc

SEQ ID NO: 31626 - DNA, 184 bp, Zea mays
  Clone ID: LIB3182-002-P1-M1-H3
tcggccaaaccttcggaccaacttggggcattaaaaggcccattgtgttccaacaatggccgcccaaacattttggcttcctatgctccttggactttctgcaagggctggttccggaaacctttttccggaatgcttggaagcttctatagcttaccttgtttccccggacctattacccacg

SEQ ID NO: 31627 - DNA, 303 bp, Zea mays
  Clone ID: LIB3182-002-P1-M1-H4
tgctggagcgctcgctcaggtggtcgagcattgaagcttattgttcgttctaaccataacgatgcatgtagtgttggagagtcttgactcacttgagaatgcacacaggtgccaggtattgtactcccgaaccatgaggatgcatgaagttgatagtacagcattacattctgcgatttacagactgggactgagtgaagaggcacataaatgtcgtccttaacgacaaggcggcagaccgagtggtaatgtaactccagaactgatcgcgcattaaattcggtggttgcagtgactgctccc

SEQ ID NO: 31628 - DNA, 333 bp, Zea mays
  Clone ID: LIB3182-002-P1-M1-H5
cgcattcagcgcagcgcaggtgtgaaggaagggggacgcggaggaagatggggctcgcgttcgggaagctcttcagccggctcttcgccaagaaggagatgcggatcctcatggtcggcctcgacgccgccggtaaaaccaccatcctttacaagctcaagctcggcgagatcgtaaccaccatccccaccatcggtttcaatgttgaaactgttgagtccaagaacattagcttcactgtctgggatgtcgggggtcaggacaagatcagacctctttggaggcattacttccagaacacccagggtcttatttttgttgtggacagcaatg

SEQ ID NO: 31629 - DNA, 346 bp, Zea mays
  Clone ID: LIB3182-002-P1-M1-H6
gctacttcctccgcctcgacaggcgtcggcgagatggtgaagagaagcaagaagagcaagagcaagcgcgtcacgctgcggcagaagcacaaggtgctgcgcaaggtgaaggagcaccaccgcaagaagcgcaaggaggccaagaaggagggcaaggccggccagcggaagaaggtcgagaaggaccccgggatccccaacgagtggcccttcaaggagcaggagctcaaggcgctcgaggcccgacgcgcgcaggcgctccaggagctcgagctcaagaaggaggcgcgcaaggagagggctcggaagaggaagctaggattgctcgaggatgaggaaattgcta

SEQ ID NO: 31630 - DNA, 307 bp, Zea mays
  Clone ID: LIB3182-002-P1-M1-H7
ctactccagagcgcagaagaacccgatcgacaccatgagggtgttgctcgttgccctcgctctcctggctctcgctgcgagcgccaccttcacgcatacaagcggcggctgcggctgccagccaccgccgccggttcatctaccgccgccggtgcatctgccacctccggttcacctgccacctccggtgcatatcccaccgccggtccacctgtcgccgtcggtaacacctggcaccgacggtccatgtgccggcgcccgttcatttgccgtcgacaccatgccactaccgtactcaaccgccccg

SEQ ID NO: 31631 - DNA, 325 bp, Zea mays
  Clone ID: LIB3182-002-P1-M1-H8
attttgagcattcagaaacacaccaagcgaagctacctagcaacgacttaacaacaatggctaccaagatattagccctccttgcgcttcttgccctttttgtgagcgcaacaaatgcgttcattattccacaatgctcacttgctcctagtgccattataccacagttcctccgaccagttacttcaatgggcttcgaacacctagctgtgcaagcctacaggctacaacaagcgcttgcggcgagcgtcttacaacaaccaattaaccaattgcaacaacaatccttggcacatctaaccatacaaaccatcgcaacacaaca

SEQ ID NO: 31632 - DNA, 378 bp, Zea mays
  Clone ID: LIB3182-004-P2-M1-A1
ctccggctagggtgttcacgcctgccgcggcgaagcttctgccctccccggcgtcgggctctggtcgtcgtcggccgggaagatggctggcggcttcagggtacttcatctggtcaggccctttctggctttcttgccagaggtgcagagcgcggataggaagataccattcagagaaaaagttatctacactgttatttctctcttcatttttctggtgtgcagccagctcccactctatggcattcattcgacgactggagctgatcctttctactggatgcgtgttatcctcgcatcaaaccgtggcactgtgatggagttgggtattactccaattgggacctctggtatggtaatgcaacttcttgtcggatc

SEQ ID NO: 31633 - DNA, 160 bp, Zea mays
  Clone ID: LIB3182-004-P2-M1-A10
cccacgcgtccggtagtatagccgctggctagctagctagttgagtcatttagcggcgatgattgagtaataatgtgtcacgcatcaccatgggtggcagtgtcagtgtgagcaatgacctgaatgaacaattgaaatgaaaagaaaaaagtattgttcc

SEQ ID NO: 31634 - DNA, 183 bp, Zea mays
  Clone ID: LIB3182-004-P2-M1-A11
gaagaaactatgtgctgtagtatagccgctggctagctagctagttgagtcatttagcggcgatgattgagtaataatgtgtcacgcatcaccatgggtggcagtgtcagtgtgagcaatgacctgaatgaacaattgaaatgaaaagaaaaaagtattgttccaaaaaaaaaattcttctac

SEQ ID NO: 31635 - DNA, 187 bp, Zea mays
  Clone ID: LIB3182-004-P2-M1-A2
ttttgagtattcagaaacacaccaagcgaagcgcactatcaactacctaacaacaatggttaccaagatattagctcctccttgagctttaacgccctatattgggagcgcaacaaatgcgttcattattacacaatgcatacttgcttccatagccattattttacagttctttccattaaatact

SEQ ID NO: 31636 - DNA, 386 bp, Zea mays
  Clone ID: LIB3182-004-P2-M1-A3
cgctcatttcctcctcgctcggctgcttgcctagggtttcacctgctaccgccccacctccagccgtcgcttcagatcccgccgctgccggcgctcgatcctacttcgttgctcctagctgatcccgctgagctcggatttgggcccttcctcaccgccggaacagcgtccggacgcgcgggggcagatctgggttttggtggcccgcttggtgtatgagaaggcctccagagcttggaagtaatggaggtggagccggcgaggagggacgctgcagcgctggacccggagctgctgcagctggcggagctcgcgccgggcgcgcttcgtgagaactccatagctgatgagctgtattcgcaggggctcgtgctacccgagacgac

SEQ ID NO: 31637 - DNA, 55 bp, Zea mays
  Clone ID: LIB3182-004-P2-M1-A4
gtcagccccgctcttaaccaatctactccagtctggtgacctacaccccatgaac

SEQ ID NO: 31638 - DNA, 457 bp, Zea mays
  Clone ID: LIB3182-004-P2-M1-A6
ctccgcaacaacaatttcttccattcaaccaactgtctacactgaaccctgctgcttatttgcagcaacaactattaccatttagccagctagctactgcctactctcaacaacaacaacttcttccatttaaccaattggccgcactgaaccccgctgcttatttgcagcagcaaatactactaccatttagccagctagctacagcaagccgtgcttccttcttgacacaacaacagttgctgccgttctaccagcagtttgcggctaaccccgcaaccctcttacaactacaacaattgttgccctttgtccaacttgctttgacaaacccagcagccttctaccaacaacacatcattggtggtgccctcttttagattgcttattagatgtaattcaataataaagttttttggatgatgtatgtggccaaccagaaataaatagttacatt

SEQ ID NO: 31639 - DNA, 270 bp, Zea mays
  Clone ID: LIB3182-004-P2-M1-A8
tcgggcaactcgcctaccattgaaaccgcggtagagcaacagcccactaccagcgaaaccccagaatgttcgtcctccgcaaaaccctcctccatgcaccgccggccgccgccgcggcggtcccctctcggatctcttccctcctccgcctcatcccctctgcatctttttctgaggtaagcggaggtggggaagaatggggcgcctcctcacccggaggcggcggctgcaggggtggtggtgggaacgaatggagcttcacctggtcta

SEQ ID NO: 31640 - DNA, 364 bp, Zea mays
  Clone ID: LIB3182-004-P2-M1-A9
tgcaacatataaagcacaatattgtaccaatattggcagccaaaatattttgcctcattatgctccttggtctttctgcaagtgctgctacggcgagcattttcccgcaatgctcacaagctcctatagcttcccttttttccccatacctctcaccagcgatgtcttcagtatgtgaaaatccaattcttttaccctacaggatccaacaggcaatcgcagcaggcatcttacctttatcacccttgttcctccaacaatcatcatacctattacagcagttaccttttgggcattttattgacacaaaacattatggcacatcaactacaacaacttgtgctagcaaaacttgctgtctact

SEQ ID NO: 31641 - DNA, 459 bp, Zea mays
  Clone ID: LIB3182-004-P2-M1-B1
tagaaagtggaatccagtagcaacaatagagcaacaatggcgaccaagatattttccctccttatgctccttgctctttctgcatgtgttgctaacgcgacaattttccctcaatgctcacaagctcctatagcttcccttcttcccccataccttccatcaatgatagcttcagtatgtgaaaacccagctcttcaaccctatatgctccaacaagcaatcgcagcaagcaacatacctttatcacccttgtttcaacaatcgccagccctatctttggtgcagtcattggtacaaaccatcagggcacagcagctgcagcaactcgtgctacctgtgatcaaccaagtagctctggcaaacctttctccctactctcagcaacaacaatttcttccattcaaccaactgtctacattgaaccgtgctgcttatttgcagcaacaactattaccattc

SEQ ID NO: 31642 - DNA, 454 bp, Zea mays
  Clone ID: LIB3182-004-P2-M1-B10
cagaaacacaccaagcgaagcacattagcaacaacctaacaacaatggctaccaagatattatccctccttgcgcttcttgcgctttttgcgagcgcaacaaatgcgttcattattccacaatgctcacttgctccaagttccattattacacagttcctcccaccagttacttcaatgggcttcgaacacccagctgtgcaagcctataggctacaacaagcaattgcggcgagcgtcttacaacaaccaatttcccagttgcaacaacaatccttggcacatctaacaatacaaaccatcgcaacgcaacagcaacaacaattcctaccagcactgagccacctagccatggtgaaccctgccgcctacttgcaacagcagttgcttgcatcaaacccacttgctctggcaaacgtagttgcaaaccagccacaacaacagctgcaacagtt

SEQ ID NO: 31643 - DNA, 451 bp, Zea mays
  Clone ID: LIB3182-004-P2-M1-B11
tcgctctctccggcgacagccgtgggatttcaatacccaactatacaatcctacatggtacaagaggccatccaagcaagcatcttacggtcattagcattaaccctccaacaaccatatgctctattgcaacagccatccttagtgcatctgtatctccaaagaatcgcggcacaacaactacaacaacagttgctaccaacaatcaatcaagtagttgcagcgaaccttgctgcttacctccagcaacaacagtttcttccattcaatcaactagatggggtgaaccctgctatctacttgcaggcacaacagctactaccatttaaccaacttgtcgggagcccttatgccttcttactgcaacaacagcttctaccattccatctgcaagctgtggcaaacattgctgctttcttgagacaacaacatttgttgccattttacccac

SEQ ID NO: 31644 - DNA, 447 bp, Zea mays
  Clone ID: LIB3182-004-P2-M1-B12
aaagcggcagtgcgtagagaggatcgtcgaacagaacagcatgaagatggtcatcgttctcgtcgtgtgcctggctctgtcagctgccagcgcctctgcaatgcagatgccctgcccctgcgcggggctgcagggcttgtacggcgctggcgccggcctgacgacgatgatgggcgccggcgggctgtacccctacgcggagtacctgaggcagccgcagtgcagcccgctggcggcggcgccctactacgccgggtgtgggcagacgagcgccatgtaccagccgctccggcaacagtgctgccagcagcagatgaggatgatggacgtgcagtccgtcgcgcagcagctgcagatgatgatgcagcttgagcgtgccgctgccgccagcagcagcctgtacgagccagctctgatgcagcagcagcagcagctgctggcagccca

SEQ ID NO: 31645 - DNA, 452 bp, Zea mays
  Clone ID: LIB3182-004-P2-M1-B2
ctgaagaagctgtgcatgttggcgacgatcgtaggaatgatgtatggggagcgagagatgcaggctgcgatgcttggctctggggcagcgacgttcgctctttcaaggaggttgccgagcggatcggtgttgaggtgacgaagtgactaagtgagctaggatggtgaatatacggaggcagaggtagtacccaggatcgcggtcgtcaaggaagccagtgaccccatccttgtggtgaaattcctgtgctggtttgtaggcttgtagctgtatgtatgacaacttattagggttccgttgaacctgctatgcatgcatgcttgctgccctgacagtgacaggcgaatgcgtcccatgcacttgaatatgaaggtctgggttctggacttctgggactcttgagttattgaattattgtcgcctagtttgacaaaattatattatttattata

SEQ ID NO: 31646 - DNA, 457 bp, Zea mays
  Clone ID: LIB3182-004-P2-M1-B4
ggccgacagtgtctacagtcaatgatcagtggcggtcgatatattttgcatccctaagcgtcctcgctcttcatgtatgcgttggtaacacaagcattttcacttaatactggccaactactatggctgcacttacatcaccgtacctttcatcaacgaccgctccaacctgggaaaacccagccgtataaccctacaggctccaacaagcaatacgaacaagcaacttacctttatcacccctgttcttgcaacaatcgccatccctacctttgttgcagccattggtacaaaccatcagggcacaacagctgcagcaactcgtgctaccagtgatcagccaagtagctctggcaaacctttctccctactctcagcaacaacaatttcttccattcaaccaactgtctacactgaaccctgctgcttatttgcagcaacaacaactactaccatt

SEQ ID NO: 31647 - DNA, 461 bp, Zea mays
  Clone ID: LIB3182-004-P2-M1-B6
cctttcttcaccactgatctcctgtataagcttgtgaagcagtgtgaagccatgctggagcagctccttccggttagtgaggcatctgtctcaagtgaagatggaaaaggagactctaatgatgaagagaagctggcgaagccaagttcttccttggtaaatggtggtggcatgccagagttagatgagatcgagtacatggagagtatgtacatgaagagcaccgtcgcggcccttaggtcactgaaggagatccggggcaagagctctactgtcagtatgttctcgttgccacctcttcagggcaacaatgcacaggacagctaccagatccgggcagagcaactagatgaggagccggagaggtggagcaaagtaacagtgatagagcaggcggccaaatgacagaccgaatgggcaaaacatctgatggctgaaccttaaaaatttagacttggaca

SEQ ID NO: 31648 - DNA, 414 bp, Zea mays
  Clone ID: LIB3182-004-P2-M1-B7
caacaagcaacatagaaagtggaatccagtagcaacaatagagcaacaatggcgaccaagatattttccctccttatgctccttgctctttctgcatgtgttgctaacgcgacaattttccctcaatgctcacaagctcctatagcttcccttcttcccccataccttccatcaatgatagcttcagtatgtgaaaacccagctcttcaaccctataggctccaacaagcaatcgcagcaagcaacatacctttatcacccttgtttcaacaatcgccagccctatctttggtgcagtcattggtacaaaccatcagggcacagcagctgcagcaactcgtgctacctgtgatcaaccaagtagctctggcaaacctttcttcctactcttagcaacaacaatttttttcattc

SEQ ID NO: 31649 - DNA, 446 bp, Zea mays
  Clone ID: LIB3182-004-P2-M1-B8
cggacgcgtgggagaaagcacaatagtgtaccaacaatggcagccaaaatattttgcttccttatgctccttggtctttctgcaagtgttgctaccgcaaccattttcccacaatgctcacaagctcctatagcttcccttcttcccccatacctctcaccagcggtgtcttcaatgtgtgaaaacccaattgttcaaccctacaggatccaacaggcaatcgcaacaggcatcttaccattatcacccttgttcctccaacaaccgtcagccctattacagcagttacctttggtccatttggtggcacaaaacatcagggcacaacaactacaacaacttgtgctagcaaaccttgctgcatactctcagcaacatcagtttcttccattcaaccaactggctgcattgaactctgctgcttatttgcaacaacaatttccatt

SEQ ID NO: 31650 - DNA, 442 bp, Zea mays
  Clone ID: LIB3182-004-P2-M1-B9
gcaacatagaaagcacaatagtgtaccaacaatggcagccaaaatattttgcttccttatgctccttggtctttctgcaagtgttgctaccgcaaccattttcccacaatgctcacaagctcctatagcttcccttcttcccccatacctctcaccagcggtgtcttcaatgtgtgaaaacccaattgttcaaccctacaggatccaacaggcaatcgcaacaggcatcttaccattatcacccttgttcctccaacaaccgtcagccctattacagcagttacctttggtccatttggtggcacaaaacatcagggcacaacaactacaacaacttgtgctagcaaaccttgctgcatactctcagcaacatcagtttcttccattcaaccaactggctgcattgaactctgctgcttatttgcaacaacaattaccattc

SEQ ID NO: 31651 - DNA, 439 bp, Zea mays
  Clone ID: LIB3182-004-P2-M1-C1
ctcccgtctccgtcgtctcgtctccgctcctcacctcgccagccatgggcaagatcaagatcggaatcaacggtttcggaaggatcggcaggctcgtggccagggtcgccctgcagagcgaggatgtcgagctcgtcgccgtcaacgaccccttcatcaccacggattacatgacctacatgttcaagtacgacaccgtgcacggccaatggaagcacagcgacatcaccctcaaggactccaagacgcttctcttcggcgagaagccggtcaccgtctttggcatcaggaaccccgaggagatcccgtggggtgaggctggtgctgagtatgtcgtggagtccaccggtgtcttcactgacaaggacaaggctgctgcacatctgaagggtggtgccaagaaggttgttatctctgccccaagcaaagatgcacccat

SEQ ID NO: 31652 - DNA, 452 bp, Zea mays
  Clone ID: LIB3182-004-P2-M1-C11
gaccattagctttatctactccagagcgcagaagaacccgatcgacaccatgagggtgttgctcgttgccctcgctctcctggctctcgctgcgagcgccacctccacgcatacaagcggcggctgcggctgccagccaccgccgccggttcatctaccgccgccggtgcatctgccacctccggttcacctgccacctccggtgcatctcccaccgccggtccacctgccgccgccggtccacctgccaccgccggtccatgtgccgccgccggttcatctgccgccgtcaccatgccactaccctactcaaccgccccggcctcagcctcatccccagccacacccatgcccgtgccaacagccgcatccaagcccgtgccagctgcagggaacctgcggcgttggcagcaccccgatcctgggccagtgcgtcgagttcctgaggcatc

SEQ ID NO: 31653 - DNA, 432 bp, Zea mays
  unsure at all n locations
  Clone ID: LIB3182-004-P2-M1-C12
attgataccaactagcaacatacatagtgaagtacactagcaacatcttagcaccaatgggagccaagatttttgccctccttgccctccttgctctttcagcaagcgctgctacctcgacttttattccacaatgctcacaacaatacctctctccggcgacagccgtgggatttcaatacccaactatacaatcctacatggtacaagaggccatccaagcaagcatcttacggtcattagcattaaccctccaacaaccatatgctctattgcaacagccatccttagtgcatctgtatctccaaagaatcgcggcacaacaactacaacaacagttgctaccaacaatcaatcaagtagttgcagcgaaccttgctgcttacctncagcaacaacagtttcttccattcaatcaactagatggggtga

SEQ ID NO: 31654 - DNA, 466 bp, Zea mays
  Clone ID: LIB3182-004-P2-M1-C2
gagaccaacaagcaacatagaaagtggaatccagtagcaacaatagagcaacaatggagaccaagatattttccctccttatgctccttgctctttctacatgtgttgctaacgcgacaattttccctcaatgctcacaagctcctatagcttccctttttcccccataccttccatcaattatagcttcagtatgtgaaaacccagctcttcaaccatataggcttcaacaagcaatcgcagcaagcaacatacctttatcgcccttgttgtgtcaacaatcgccagccctatctttggtgcagtcattggtacaaaccatcagggcacaacagctgcagcaactcgtgctacctgtgatcaaccaagtagctctggcaaacctttctccctactctccgcaacaacaatttcttccattcaaccaactgtctacactgaaccctgctgcttatttgcagcaaca

SEQ ID NO: 31655 - DNA, 442 bp, Zea mays
  Clone ID: LIB3182-004-P2-M1-C5
gcggcagtacacggccgctgggactgggagagtggggagtgagacgctgctgttgccgagtgcgaggagacactactactcttaagagtcaaaactcaacagcagcaggggcgaccgagctctgcgtgcgcggggagagctcggagaaggcagcagcatgggcgccgggatcagggtcctagcggcgctcttggcggcgctcgcggcagccaccgccggcgtgacggcgcagctgcggcaggactactacgcggcggtgtgcccggacctggagagcatcgtgcgcgccgcggtgtccaagaaggtgcaggcgcagtccgtcgccgtgggcgccaccatccgtctcttcttccacgactgcttcgtcgaggctggcgggccgtcgtacgcggtggagctggtgaggctggacgggctggtgttcatgttcaccaacgtcgac

SEQ ID NO: 31656 - DNA, 452 bp, Zea mays
  Clone ID: LIB3182-004-P2-M1-C6
gaccattagctttatctactccagagcgcagaagaacccgatcgacaccatgagggtgttgctcgttgccctcgctctcctggctctcgctgcgagcgccacctccacgcatacaagcggcggctgcggctgccagccaccgccgccggttcatctaccgccgccggtgcatctgccacctccggttcacctgccacctccggtgcatctcccaccgccggtccacctgccgccgccggtccacctgccaccgccggtccatgtgccgccgccggttcatctgccgccgccaccatgccactaccctactcaaccgccccggcctcagcctcatccccagccacacccatgcccgtgccaacagccgcatccaagcccgtgccagctgcagggaacctgcggcgttggcagcaccccgatcctgggccagtgcgtcgagttcctgaagcatc

SEQ ID NO: 31657 - DNA, 452 bp, Zea mays
  Clone ID: LIB3182-004-P2-M1-C8
gccatatacagcaagcgagccatggtcacggtctatgactacgtgaccttgtatgccgccgcctagcccttccacgacgacacttaacttcatttcgacggctcggcccccgcagccgtcgacaggtgaaaaccttgccggacgcctactcaccctccccgttgggcatgccccactccaacggtgacctacacgacaaccctttcgccgcatttgctgtctccaacagtgggcccatccttacggcgaccaccaagatgggctcgagaggagggattactgctccgcgagtggcgcctacaaacagctattcaccttgaggaaaaagagaagaaggagaacgatgctgtgagccaaatcatcgctgatgctgaagagtttaacaaagcttttggtgagaagagaaagctcaatgctgatacaagcaagggccaaaaccgtgacagggagaa

SEQ ID NO: 31658 - DNA, 460 bp, Zea mays
  Clone ID: LIB3182-004-P2-M1-C9
aacaattcgtgcctgcctccctgcctcggcctcctccctcgtcctcccctcctccgccgcctcaaacccggccccctcgcgcgcgtgcgcggcgctcgaggcgacgaatccagccacctcctccgcacccatccccgccgccggtcgccgatgagctcggaaggctgggacgctgacccgaattttatggggagaggatgccagagctgcgaagcaatactcgtcaagcacgcttaaggtctaagaagcttgacgatctgcagccaggagagccgcttgcgaaaccggtgtcacctgctctgccgagcgcacggaagcgtgctcctacacgtgctgctaggggcagaaagggtgctgctgggagaggagtgcctcccgcaccaaagcctagaaaaaagggggttgatattgtcgtcttagaagctgatcctgcttgtgaaaccccacttaaagctttcaa

SEQ ID NO: 31659 - DNA, 450 bp, Zea mays
  Clone ID: LIB3182-004-P2-M1-D10
gggccacactccgctgctccgccatggcgatccgctccaaggcctggatctcgctgctgctcgcgctgaccgtcgctctctccgcccgggcggaggaggagcccgccgccgcggcggagggcgaggccgtgctcaccctcgacgtcgacagcttcgacgaggccgtcgccaagcaccccttcatggtcgtcgagttctacgccccctggtgtgggcactgcaagaaacttgctccagagtatgagaatgcggccaaggcacttagcaagcatgacccaccgattgttctcgctaaggttgatgctaacgaggagaagaacaggccgcttgctaccaagtacgagatccaagggttcccaaccatcaagatcttcagggaccaggggaagaacattcaggaatacaagggccctagggaggctgatggcattgtggattacttgaagaagc

SEQ ID NO: 31660 - DNA, 444 bp, Zea mays
  Clone ID: LIB3182-004-P2-M1-D11
cttcagaccattagctttatctactccagagcgcagaagaacccgatcgacaccatgagggtgttgctcgttgccctcgctctcctggctctcgctgcgagcgccacctccacgcatacaagcggcggctgcggctgccagccaccgccgccggttcatctaccgccgccggtgcatctgccacctccggttcacctgccacctccggtgcatctcccaccgccggtccacctgccgccgccggtccacctgccaccgccggtccatgtgccgccgccggttcatctgccgccgccaccatgccactaccctactcaaccgccccggcctcagcctcatccccagccacacccatgcccgtgccaacagccgcatccaagcccgtgccagctgcagggaacctgcggcgttggcagcaccccgatcctgggccagtgcgtcgag

SEQ ID NO: 31661 - DNA, 422 bp, Zea mays
  Clone ID: LIB3182-004-P2-M1-D2
taccaagcgaagcgcactatcaacaacctaacaacattggctaccaagatattatccctccttgcgctttttgcccttttagtgagcgcaacaaatgcgttcattattccacagtgctcacttgctcctagtgccattattccacagttccttccaccagttactttaatgggcttcgaacatccagccgtgcaagcctacaggctacaactagcgcttgcggcgagcgtcttacaacaaccaattgcccaattgcaacaacaatccttggcacatctatacctacaaaccatcgcaacgcaacagcaacaacagtttctgtcatcactgagccacctagccgtggtgaaccctgtcggctacttgcaacatcagatacttgcattcaacccacttgctctggcgaacgtagcttcatacca

SEQ ID NO: 31662 - DNA, 181 bp, Zea mays
  Clone ID: LIB3182-004-P2-M1-D3
gcggctagggaggacaatgctcaggtacttcttttcgtgcgatgcaaggacaacaatgccgcccatgccagcgaatctctgcgtcgagctaaggtcaagttccctggccgccaaaagatcatggcgagcaccaagtgggggctgaccaagttcaaccccgctgactacctatagtacatga

SEQ ID NO: 31663 - DNA, 448 bp, Zea mays
  Clone ID: LIB3182-004-P2-M1-D4
cacggtctccctcttcctgtcagtagtagagtgagagtgaggcagcgagtgggagacaaggggaaatggggaagggagcgcaagggagcgatgcggcggcggcgggcggcgaggtggaggagaacatggcggcgtggctggttgccaagaacaccctcaagatcatgcccttcaagctcccgcccgtcggcccttatgatgtccgcgtgcgcatgaaggcagtggggatttgcggcagcgatgtgcactacctaagggagatgcgcatcgcgcacttcgtggtgaaggagccgatggtgatcgggcacgagtgcgcggtcgtggtcgaggaggtgggcgccggcgtgacgcacctgttcgtgggcgaccgcgtggcgcttgagccgggcgttagctgctgtgcgctgccccactgcatgggcgggcggttcaacctgtgcgaggacat

SEQ ID NO: 31664 - DNA, 435 bp, Zea mays
  Clone ID: LIB3182-004-P2-M1-D5
agaccattagctttatctactccagagcgcagaagaacccgatcgacaccatgagggtgttgctcgttgccctcgctctcctggctctcgctgcgagcgccacctccacgcatacaagcggcggctgcggctgccagccaccgccgccggttcatctaccgccgccggtgcatctgccacctccggttcacctgccacctccggtgcatctcccaccgacggtccacctgccgtcgacggtccacctgccaccgacggtccatgtgccgtcgccggttcatctgtcgccgccaccatgccactaccctactcaaccgtcccggcctcagtcttattcccagccacacccatgctcgtgccaacagtcggatccaagcccgtgccagctgtagggaacctgcagcgttggcagaacccccatcctgggccagtgcg

SEQ ID NO: 31665 - DNA, 379 bp, Zea mays
  Clone ID: LIB3182-004-P2-M1-D6
gtcttaaaaccatagcgttcatttactacagagcgcactaaaacacgcgcgcctccatgagggtgttgctcgtatagcgcgatctactggctattgattggagcgccacctacacccatacaagcggggaatgcgggtggcagccaacgtcaacggtttatctacagacgccggtgcatccagctgctgcgatatacaagagacctgcaccgcatgtcctatcgaacagtcacgcagcgccgaatggtcgaacgtgacagcgccctgtacatggggcattcaagcgctgagtgtgcggcggcaacacgcaactagactactaaacctgccagggctctagctcatgctcagttacatctatgcccttgccaacaggcga

SEQ ID NO: 31666 - DNA, 395 bp, Zea mays
  Clone ID: LIB3182-004-P2-M1-D7
acatgttcgatgttttgcgcagcagctccgatgtctccgcgcggctcgctgttttgtgttgcgcagtgagcagcacgccgtgatgcccgtcggtggtttgctgtttttgcgcagccccgtcgtcgtcgttgttcacccccggtgaggccacgtaaatccttgttcgattccgcatcggtattaatttcctatgattaattgtgtgtgtgtgctgatttgttgtgtttggtggaggagagaaaccccgtgttttgcgaggagaaggcaagccgcttaacgctcgtcgatggcgaagctatgcacaaattggaatcaccgtcgttcttgcaaacgccgtttgtgtttgtttatggaccgagaggtgacgaccgtgcaagtgatgttgtgccacccac

SEQ ID NO: 31667 - DNA, 458 bp, Zea mays
  Clone ID: LIB3182-004-P2-M1-D8
tcggccgcatccaagcccgtgccagctgcagggaacctgcggcgttggcagcaccccgatcctgggccagtgcgtcgagttcctgaggcatcagtgcagcccgacggcgacgccctactgctcgcctcagtgccagtcgttgcggcagcagtgttgccagcagctcaggcaggtggagccgcagcaccggtaccaggcgatcttcggcttggtcctccagtccatcctgcagcagcagccgcaaagcggccaggtcgcggggctgttggcggcgcagatagcgcagcaactgacggcgatgtgcggcctgcagcagccgactccatgcccctacgctgctgccggcggtgtcccccactgaagaaactatgtgctgtagtatagccgctggctagctagctagttgagtcatttagcggcgatgattgagtaataatgtgtcacgcatcaccatgggt

SEQ ID NO: 31668 - DNA, 440 bp, Zea mays
  Clone ID: LIB3182-004-P2-M1-E1
ataccatgagcattctgtaacacaccaagcgaagcacattatccgcaaccttacagcagtggctaccaagatattattctctctcttgcgctttttgagctgtatgctgagcgcatcaaatgcgttgattattgcagactgctacacttgctccaagatccattattacacagtgcacttcaccagttacgttaatgtgccttctaacacgcatctgtgcaagcctataggctatcaacaagcaattgcagctagcgtcttacatcaacgtattttccagttgcaacaacaatccttggcacatctaacaatacaatcaatcgcaacggaacaagaacaacaattagtaccagcaatgagcgagctaaccatggtgtacaatgccgtgtactttcaacagaagctgcttgcatgaaagccacttgctcttgcaaacgtag

SEQ ID NO: 31669 - DNA, 445 bp, Zea mays; identical to SEQ ID NO: 19348
  Clone ID: LIB3182-004-P2-M1-E10

SEQ ID NO: 31670 - DNA, 441 bp, Zea mays
  Clone ID: LIB3182-004-P2-M1-E12
gcatcatagaaagcacaatagtgtaccaacaatggcagccaaaatattttgcctccttatgctccttggtctttctgcaagtgctgctacggcgaccattttcccgcaatgctcgcaagctcctatagcttcccttcttcccccgtacctctcaccagcggtgtcttcggtatgtgaaaacccaattcttcaaccctacaggatccaacaggcaatcgcagctggcatcttacctttatcacccttgttcctccaacaatcatcagccctattacaacagttacctttggtgcatttattggcacaaaacatcagggcacaacaactacaacaacttgtgctagcaaaccttgctgcctactctcagcaacagcagtttcttccattcaaccaactaggttcattgaactctgcttcttatttgcaacaacaacaactacc

SEQ ID NO: 31671 - DNA, 211 bp, Zea mays
  Clone ID: LIB3182-004-P2-M1-E3
ccctgctaccttcttgacacaaccacagttgttgccgttctaccagcacgctgcgcctaacgctggcaccctcttacaactgcaacaattgctgccattcaaccaacttgctttgacaaacctagcagtgttctaccaacaacccatcattggtggtgccctcttttagatttcttatgagttatagttcaataataaagttttttgtctg

SEQ ID NO: 31672 - DNA, 412 bp, Zea mays
  Clone ID: LIB3182-004-P2-M1-E4
ctcgcgccgccgccttcttcgccacccagcgctcgagctcctcgctccctgcgagcgcgcgccgcaacgccaccatgaagttcaacatcgcgaacccttccaccgggtgccaaaagaagctggaaatcgatgacgaccagaagctacgtgccttttatgaccgaaggatatcccaggaggtcagtggtgatgctctgggtgaggagttcaagggttatgtcttcaagatcatgggtggatgtgacaagcaaggctttccaatgaagcaaggagttttgacttctggtcgtgttcgtcttctgcttcataggggcactccctgctttcgtggttatggcaggcgtaatggtgagcgcaggaggaagtctgtccgtggttgcattgtgagccaagatctatctgttatcaactt

SEQ ID NO: 31673 - DNA, 456 bp, Zea mays
  Clone ID: LIB3182-004-P2-M1-E5
agctacttggctgctgatgacctattccgaagcaccatccacgaggctaattcggacgtactgagtggctgtgacaccctgcaaagcatatacagagctctgattagagaaggaggagatcagcggcagcaacaaggcggcagcgacagtaatactacgacacttgagaaagccggccagcttgctgggtcactgattcaccagttcacggatgaaaaggctcgttggaagtttctcgcagaggtgtgggccgacatactggtacacactgccccctcttggaacgccgcggctcacaagaagtgccttgcgactggtggcgagtttataacccacatctgggccattctttctcactgcaacgtccagagcagcaggcgctggccacgtcaggaatccccgcaagatgacgacgaggtagtagcagagaatcatgcactgtcacaacaggtagta

SEQ ID NO: 31674 - DNA, 119 bp, Zea mays
  Clone ID: LIB3182-004-P2-M1-E6
agaccattagctttatctactccagagcgcagtagaacccgatcgacaccatgagggtgttgctcgttgccctcgttctcctggctctcgctgctagcgccacctccacgcatacaagc

SEQ ID NO: 31675 - DNA, 382 bp, Zea mays
  unsure at all n locations
  Clone ID: LIB3182-004-P2-M1-E7
ccagcgggncgggggcggactgcaacaccatccacgagacgggggcgngctacaaccccaacaccgacgcggcgcaccgctcctgggcggccaacagctactaccagaacaacaaggccaagggcgccacctgcgacttcaccggcaccgccgtcctcaccaccagcgacccaagttctttaggctgctcttaccctaccggtgcaagcgccgttggaaccatgaccccgaccactgcaggcaccatgggaggaggaaccgcagggacctccacaggcacaggcacagccggcgctggcatggggacaggcactgccaccggaactgctagtactgtgttcggcggcctaggaccaggcacggacgctagtttggacaccgc

SEQ ID NO: 31676 - DNA, 438 bp, Zea mays
  Clone ID: LIB3182-004-P2-M1-E8
ccattagctttatctactccagagcgcagaagaacccgatcgacaccatgagggtgttgctcgttgccctcgctctcctggctctcgctgcgagcgccacctccacgcatacaagcggcgagacagcgggggacggtgaagtggttcaacgacaccaagggcttcgggttcatctcccccgaggacggcagcgaagatctcttcgtgcaccagtcgtcgatcaagtcggagggcttccgctcgctcgcggagggcgaggaggtggagttttccgtctcggagggtgacgacggccgcactaaggccgtctacgtgaccggccccgacggatccttcgtcaggggcggcggaagcggaggaggaggcggcggcggctacagctcccgcggcggtggcggatcttgcggcggcggtcgcagctacagtggtagcttgggc

SEQ ID NO: 31677 - DNA, 214 bp, Zea mays
  Clone ID: LIB3182-004-P2-M1-E9
agaccattagctttatctactccagagggcttttataacccgatcgacaccatgagggtgttgctcgttgccctcgctctcctggctctcgctgcgagcgccacctccacgcatacatgcggcggctgcggctgccatccaccgccgtcgggttatctaccgccgtcggtgcattttgccaccttcggttctcctgccacctctggtgcttttt

SEQ ID NO: 31678 - DNA, 439 bp, Zea mays
  Clone ID: LIB3182-004-P2-M1-F10
gaaagcacaatattgttccatctatgggagccataatatcctgtcttgctatgctacctggtctttctgcaagtgctgttgcgagcgccattttcccacaatgctaagacgctcctatagacttacctttcttcccccgtacactctcaccagcggtgcttgtggtgtgggaaaacccgaccttttaaccctatatgatccaacaggcaatcgaagctggcatcttacctttatcacgcttgtttctccaacaatcatcagccgtattacagcaattacctctggtgcatgtattggcacaaaacatcaaggcgcaacaactacaacaacttgtgcttgcataccttgctgcctactctaagaaacaacagagtcttccattgaatcaacttgctgtattgaactctgcttcttatttgcaacaacagcaactaccatt

SEQ ID NO: 31679 - DNA, 426 bp, Zea mays
  Clone ID: LIB3182-004-P2-M1-F11
ggcttctcctccccctccggttcgggttcgggttcgtgaggttctccggggttcggtttcgtgggtgagcggatcgagatggcggcgtcggatgttgagtaccgctgcttcgtcggcggcctcgcctgggccacggacgaccactccctccacaacgccttcagcacctacggcgaggtcctcgagtccaagatcatcctcgatcgggagacgcagaggtcccgcggcttcggcttcgtcaccttctccacggaggaggcgatgcggaacgccatcgagggcatgaacggcaaggagctggacggccgcaacatcaccgtcaacgaggcccagtcccgcggcggccgtggaggcggcggcggcggcgggtacggtggtggccgtggaggcggcggctactgcggtggcgggcgccgtgatggctgc

SEQ ID NO: 31680 - DNA, 320 bp, Zea mays
  Clone ID: LIB3182-004-P2-M1-F2
gcagcattgaactctgctgcttatttacaacagcaacagctaccaccattcagccagctagctgatgtgagccctgttgccttcttgacacaacaacagttgttgccgttctacctgcacgctgcgcctaacgctggcacccttttacaactgcaacaaattggtgcattcaaccaacttggtttggccaacccaaccacggtctaacaaccacccattattggggggggccctttttaaaatggctatgaagtataagtcaataattgaagtttttggatgatggttgggggtttccaaaaattagaaaggacatttct

SEQ ID NO: 31681 - DNA, 459 bp, Zea mays
  Clone ID: LIB3182-004-P2-M1-F3
cctccctggctctgtgaccgtgacgagacacgtcgccgagaggccaccccgcttgggattgtgaggtaaagcgtgatggcagcgccaccggcgagggcccgagccgactacgactacctcatcaaactgctcctcatcggtgacagcggagttggaaaaagttgtctcctgttacggttctcagatggatcattcaccactagctttattaccactattggcattgacttcaagataaggactgtcgagttggatggcaaacggattaagttgcagatctgggacactgcaggccaagaacgtttccgcacgattactactgcttactacaggggagcaatgggcatcttgcttgtgtacgatgtcacagacgagtcatctttcaataacataagaaactggatcagaaacattgagcaacatgcttcggataacgtgaacaaaattctggtggggaat

SEQ ID NO: 31682 - DNA, 400 bp, Zea mays
  Clone ID: LIB3182-004-P2-M1-F4
gtccgggtcatcgcctaccggacctataaagggaagcccctactgctgaacgtggtcaggcgcgccgagcaaatgttgatcaataatacgtcacgtgtcaaggagtacctaccaatcaccggtctggctgaatccaataagctgcgcgctaagcttatctttggcgctgacagccctgctattcatgagaatagggttgctaccgcgcagcgcctatcgggtactggctctttaagagtcggaggtgaatttgttgcaaggcactatcacgagcgcactatctacatgccacaaccaacctggggaaatcacccaaaagtcttcaccctatctggcttgaacgttaggagctaccgctattatgatcctgcaacatgcagccttcacttcgaaggactcc

SEQ ID NO: 31683 - DNA, 62 bp, Zea mays
  Clone ID: LIB3182-004-P2-M1-F5
taaggaaagcgccacgccggccgtaccggtccggcatggccgacccgacccacccatccgga

SEQ ID NO: 31684 - DNA, 463 bp, Zea mays
  Clone ID: LIB3182-004-P2-M1-F7
agcattcagaaacacaccaagcgaagcgcactagcaacaacctaacaacaatggctaccaagatattagccctccttgcgcttcttgcccttttagtgagcgcaacaaatgcgttcattattccacagtgctcacttgctcctagtgccattattccacagttcctcccaccagttacttcaatgggcttcgaacatccagccgtgcaagcctacaggctacaactagcgcttgcggcgagcgtcttacaacaaccaattgcccaattgcaacaacaatccttggcacatctaaacctacaaaccatcgcaacgcaacagcaacaacagtttctgccatcactgagccacctagccgtggtgaaccctgtcgcctacttgcaacagcagctacttgcatccaacccacttgctctggcgaacgtagctgcataccagcaacaacaacgtctgcaacagtttat

SEQ ID NO: 31685 - DNA, 456 bp, Zea mays
  Clone ID: LIB3182-004-P2-M1-F8
attttcagcattcagaaacacaccaagcgaagcgcactagcaacaacctaacaacaatggctaccaagatattagccctccttgcgcttcttgcccttttagtgagcgcaacaaatgcgttcattattccacagtgctcacttgctcctagtgccattattccacagttcctcccaccagttacttcaatgggcttcgaacatccagccgtgcaagcctacaggctacaactagcgcttgcggcgagcgtcttacaacaaccaattgcccaattgcaacaacaatccttggcacatctaaacctacaaaccatcgcaacgcaacagcaacaacagtttctgccatcactgagccacctagccgtggtgaaccctgtcgcctacttgcaacagcagctacttgcatccaacccacttgctctggcgaacgtagctgcataccagcaacaacaacgtc

SEQ ID NO: 31686 - DNA, 333 bp, Zea mays
  Clone ID: LIB3182-004-P2-M1-G1
agaccattagctttatctactccagagcgcagaagaacccgatcgacaccatgagggtgttgctcgttgccctcgctctcctggctctcgctgcgagcgccacctccacgcatacaagcggcggctgcggctgccagccaccgccgccggttcatctaccgccgccggtgcatctgccacctccggttcacctgccacctccggtgcatcttccaccgccggtccacctgtcgtcgtcggtcacctgccagcgtcggtccatgtgccgactgcggttcatttgccgccgtcaccatgccactaccctactaaaccgccccggcttagtcttat

SEQ ID NO: 31687 - DNA, 347 bp, Zea mays
  Clone ID: LIB3182-004-P2-M1-G10
caagaagtgcttttagaggcaaatgccttgaactagcacggttggtgcaccatttgctgctgttcatgtcgcaggtgtgctcgtacctgaacgttgcggcctttcgggtgctgatgcagcgatgcttgtgtctacaccttactccagccacagttcatacctgacggttgctaagtgttgatgcatctagctagctcggttaggatggattggcccttaggtttatttagagtggaatagagtgtagtgtcggcatgtactccttaggagttttagccaattgcccatttgtacctgtagtaccagagaatttgttgagatttccttttaaatttacattatgatcc

SEQ ID NO: 31688 - DNA, 181 bp, Zea mays
  Clone ID: LIB3182-004-P2-M1-G11
gacggagacacctagtggtccacgaagagaggaaacgctaacgaccgaccatgtggtaggtcccacgcaccgtgcggctggacctactttccacccagtgggcgtacttcgatgacgctgctgcgggcgaatccccgacgttaccagagccatacgggggcgcacacacaccggctgatgt

SEQ ID NO: 31689 - DNA, 450 bp, Zea mays
  Clone ID: LIB3182-004-P2-M1-G12
gaaacacaccaagcgaagcgcactagcaacaacctaacaacaatggctaccaagatattatccctccttgcgcttcttgcgctttttgcgagcgcaacaaatgcgtccattattccacaatgctcacttgctcctagttccattattccacagttcctcccaccagttacttcaatggccttcgaacacccagctgtgcaagcctataggctacaacaagcgattgcggcgagcgtcttacaacaaccaattgcccaattgcaacaacaatccttggcacatctaacaatacaaaccatcgcaacgcaacagcaacaacagttcctaccagcactgagccacctagccatggtgaaccctgtcgcctacttgcaacagcagctgcttgcatccaacccacttgctctagcaaacgtagttgcaaaccagcaacaacaacaactgcaacag

SEQ ID NO: 31690 - DNA, 110 bp, Zea mays
  Clone ID: LIB3182-004-P2-M1-G2
gatctatctacttcagagggcaaatatacccgcatcgacaccatgagggtgtagctcgtctgactatgctctcctggctctcgtgtgcgtgcgcgcacctgcacagcata

SEQ ID NO: 31691 - DNA, 450 bp, Zea mays
  Clone ID: LIB3182-004-P2-M1-G3
gaccaactagcaacatagaaagcacaatagtgtaccaacaatggcagccaaaatattttgcctccttatgctccttggtctttctgcaagtgctgctacggcgaccattttcccgcaatgctcgcaagctcctatagcttcccttcttcccccgtacctctcaccagcggtgtcttcggtatgtgaaaacccaattcttcaaccctacaggatccaacaggcaatcgcagctggcattttacctttatcacccttgttcctccaacaatcatcagccctattacaacagttacctttggtgcatttattggcacaaaacatcagggcacaacaactacaacaacttgtgctagcaaaccttgctgcctactctcagcaacagcagtttcttccattcaaccaactaggttcattgaactctgcttcttatttgcaacaacaacaactacc

SEQ ID NO: 31692 - DNA, 253 bp, Zea mays
  Clone ID: LIB3182-004-P2-M1-G4
caacatcttagcacgcaatgggagccaatattttatggctccattgaattcttgctcactgagcaagcgctgacacctcgactactattacacaatggtcacaacaatacctatttgcgtcgacagacatgggattttaatacgctagtatacaatcctacatggcacaagaggccatccttgccagcattttaccagcattaacatgaaacgtgccacaaccatgtgctgtattgtaacaaccatgcttagt

SEQ ID NO: 31693 - DNA, 445 bp, Zea mays
  Clone ID: LIB3182-004-P2-M1-G5
gccggggtcggcagcagaggggagcagagagatctcattctccgatccgcccaggccaccatggcggaggatgctacgagcagccacccgtcacgctacgtcaagctcaccaaggaccaggacgcccccgccgaggacatccgccccggcgagctcaaccagccagttcacgtcccgcagctcgaaggccggaggtgtagcgagtgcggtcaggtcctgcccgagagctacgagccgcccgccgacgagccctggaccaccgggatcttcggatgcaccgatgacccagagacctgccgaactggattgttttgcccctgcgtgctgtttgggcgcaacgttgaggctgttagggaggacatcccttggacaacttcttgcgtgtgccatgctgtattcgttgaaggagggatcacgctggcgattctgacggcgatatttcacg

SEQ ID NO: 31694 - DNA, 457 bp, Zea mays
  Clone ID: LIB3182-004-P2-M1-G6
cagaaacacaccaagcgaagcacattagcaacaacctaacaacaatggctaccaagatattatccctccttgcgcttcttgcgctttttgcgagcgcaacaaatgcgttcattattccacaatgctcacttgctccaagttccattattacacagttcctcccaccagttacttcaatgggcttcgaacacccagctgtgcaagcctataggctacaacaagcaattgcggcgagcgtcttacaacaaccaatttcccagttgcaacaacaatccttggcacatctaacaatacaaaccatcgcaacgcaacagcaacaacaattcctaccagcactgagccacctagccatggtgaaccctgccgcctacttgcaacagcagttgcttgcatcaaacccacttgctctggcaaacgtagttgcaaaccagccacaacaacagctgcaacagttttt

SEQ ID NO: 31695 - DNA, 425 bp, Zea mays
  Clone ID: LIB3182-004-P2-M1-G7
gaccataggaatgcagggaatcacatcgccatggcagccaagatgtttgcattgtttgcgctcctagctctttgtgcaaccgccactagtgctacccatatcccagggcacttgtcaccactactgatgccattggctaccatgaacccatggatgcagtactgcatgaagcaacagggggttgccaacttgctagcgtggccgaccctgatgctgcagcaactgttggccttaccgcttcagccgtgccagatgccaatgatgatgccaggtatgatgccaccgatgacaatgatgccgatgccgaatatgatgccatcgatgatggtgccgactatgatgtcaccaattacgatagctagtatgatgccaccgatgatgatgccaaacatggtttcaccaatgatgatgcccagtatgatgcc

SEQ ID NO: 31696 - DNA, 442 bp, Zea mays
  Clone ID: LIB3182-004-P2-M1-G9
ggacgtcagcctagcaattagctcatcgactccagattggagaactcgacaccatgaaggtgctgatcgttgcccttgctctcctggcgctcgctgcgagcgccgcctccagtacaagcggcggctgtggctgccagacaccaccgtttcatctaccgcctccgttctatatgccgcctccgttctatctgccgccgcagcagcagccgcagccatggcaataccccactcaaccaccgcagctaagcccgtgccagcagttcggatcctgcggcgtcggcagcgtcggcagcccgttcctgggccagtgcgtcgagttcctgaggcaccagtgcagcccggcggcgacgccctacggctcgccacagtgccaggcgctgcagcagcagtgctgtcaccagatcaggcaggtggagccgctgcaccggttccaggcgacata

SEQ ID NO: 31697 - DNA, 452 bp, Zea mays
  Clone ID: LIB3182-004-P2-M1-H1
attttgagcattcagaaacacaccaagcgaagctacctagcaacgacttaacaacaatggctaccaagatattagccctccttgcgcttcttgccctttttgtgagcgcaacaaatgcgttcattattccacaatgctcacttgctcctagtgccattataccacagttcctccgaccagttacttcaatgggcttcgaacacctagctgtgcaagcctacaggctacaacaagcgcttgcggcgagcgtcttacaacaaccaattaaccaattgcaacaacaatccttggcacatctaaccatacaaaccatcgcatcacaacagcaacaacagttcctaccagcactgagccaactagatgtggtgaaccctgtcgcctacttgcaacagcaggtgcttgcatccaacccacttgctctggcaaacgtatcttgataccaacaacaacaa

SEQ ID NO: 31698 - DNA, 247 bp, Zea mays
  Clone ID: LIB3182-004-P2-M1-H11
gtcgtagacattcatgcctctaccgagagggaggcacatccagaggcggtggctgcgagcccatctgtggcttatacagtcgccaacaggacatttactgctgctggggagacagccactgctgatgatcatggctgccggccacaacaggaacatcatggcggggaacgctcactgcctcagcctgaatagtaccaggctggggcttacaatccgccctaagaagcagttgtgcatgaggaacagc

SEQ ID NO: 31699 - DNA, 383 bp, Zea mays
  Clone ID: LIB3182-004-P2-M1-H12
ctactatactatactctaggaagcaaggacaccaccgccatggcagccaagatgcttgcattgttcgctctcctagctctttgtgcaagcgccactagtgcgacccatattccagggcacttgccaccagtcatgccattgtgtaccatgaacccatgcatgcagtactgcatgatgcaacaggggcttgccagcttgatggcgtgtccgtccctgatgctgcagcaactgttggccttaccgcttcagacgatgccagtgatgatgccacagatgatgacgcctaacatgatgtcaccattgatgatgccgagcatgatgtcaccaatggtcttgccgagcatgatgtcgcaaatgatgatgccacaatgtcactgcgacgc

SEQ ID NO: 31700 - DNA, 465 bp, Zea mays
  unsure at all n locations
  Clone ID: LIB3182-004-P2-M1-H2
gcggcggctgtggctgccagacaccaccgtttcatctaccgcctccgttctatatgccgcctccgttctatctgccgccgcagcagcagccgcagccatggcaataccccactcaaccaccgcagctaagcccgtgccagcagttcggatcctgcggcgtcggcagcgtcggcagcccgttcctgggccagtgcgtcgagttcctgaggcaccagtgcagcccggcggcgacgccctacggctcgccacagtgccaggcgctgcagcagcagtgctgccaccagatcaggcaggtggagccgctgcaccggtaccaggcgacatacggtgtggtcctgcagtccttcctgcagcagcagccgcagggcgagctcgcggcgctgatggcggcccaggtagcgcatcagctgacggcgatgtgcggnctgcagctgcagcagccaggttcctgcccttgcaacgcac

SEQ ID NO: 31701 - DNA, 453 bp, Zea mays
  unsure at all n locations
  Clone ID: LIB3182-004-P2-M1-H4
cagacctttccccttccgtccccggccggcgccaacgccactccagtgagccgagggcggagacggtcacggtgggcagagtgacacgccgcacgcctctccgccccgctccgctccagattgcgcgcacccacccatggcgctcgccgcttcccaccacggcttcctgcccttcgcccccgctgccacgcctaccccgtcacgggggcacctgcgcttccgcgccgcgcgccctctgccccgccccgcccggagaatttgttgccaatctatcaactcagctaatgtgttgggagcttcttcaacgacatctgatgaggcagtcccagtcccagttgtccagatagatcaggactcagaccgtgatgcgaccatngtgcagctaagttttggagatcgtttgggggcgcttcttgacacgatgaaagcactcaaggaccttggccttgatgt

SEQ ID NO: 31702 - DNA, 382 bp, Zea mays
  Clone ID: LIB3182-004-P2-M1-H5
agcatgcaatgtcatatctttattatagtggcatctaaattaaagtgagttaacgcgacattacaaccctcaatagctgacaaaactcctatagttacccatcttaatcgatacctttataaatgatgttgcagttggaaatacaatatgcaacctatatgcccctcaagaaatttgagcatgcaacaatacctaaatgaactcgtctatcaatcggcatcaatatctttggttcagtcattgacacacaccatgacggctcaacatgtgcaggaactagtgctagctgtgatcaaccaattagctttgtcaaaccttatcttcctactctcatgaacaacaagtttttaaattcaagctactgtttacattgaacactact

SEQ ID NO: 31703 - DNA, 215 bp, Zea mays
  Clone ID: LIB3182-004-P2-M1-H6
caactagcaacatacatagtgaagtacactagcaacatcttagcaccaatgggagccaagatttttgccctccttgccctccttgctctttcagcaagcgctgctaccttgacttttatttcacaatgctcacaacagtacctcctcttcggggacagccgtgtgattacaataccctgcgatacaatgctacattggtacaagaggtcatacaa

SEQ ID NO: 31704 - DNA, 276 bp, Zea mays
  Clone ID: LIB3182-004-P2-M1-H8
tgaggaactgcatgatccaggatctctcctggaagggccctgccaagaactgggagaacgtgctgctcagcctcggggtcgccggcggcgagccaggggtcgaaggcgaggagatcgcgccgctcgccaaggagaacgtggccgcgccctgaagagttcggcctgcagggcccctgatctcgcgcgtggtgcaaagatgttgggacatcttcttatatatgctgtttcgtttatgtgatttggtcaagtatgtgtagctgcttgcttgtgctagtg

SEQ ID NO: 31705 - DNA, 447 bp, Zea mays
  Clone ID: LIB3182-004-P2-M1-H9
tcggtttccctctcctgatcgtcctgtttctgatattagcagccatggcggccgagccggagatgcaggcggtccccgcggtacaggagacggccgtgcacatcgtgtacgttgaccgccccgaggacgccgaccctgaggagtttcacatccgcacccttacccccgtcctaggcagcgaacagaaggccagggacgcattgctctaccactacaagaacgccgtcagcggcttctccgcgaagctcaccccccagcaggtcaaggatctcaaggagcaaccaggtgttctccaggttgtgccgagccagacttaccagctacatggtcctgggtctggcacttaccaaggcacgacacacaccttgggccttatgtgaaggcgtatgagaatcaagaagaacgtgtcttatatggttggatggcacaagtccagacgaatgtgta

SEQ ID NO: 31706 - DNA, 390 bp, Zea mays
  Clone ID: LIB3182-005-P2-M1-A1
gaccaacaagcaacatagaaagtggaatccagtagcaacaatagagcaacaatggcgaccaagatattttccctccttatgctccttgctctttctgcatgtgttgctaacgcgacaattttccctcaatgctcacaagctcctatagcttcccttcttcccccataccttccatcaatgatagcttcagtatgtgaaaacccagctcttcaaccctataggctccaacaagcaatcgcagcaagcaacatacctttatcacccttgtttcaacaatcgccagccctatctttggtgcagtcattggtacaaaccatcaaggcacagcagctgcagcaactcgtgctacctgtgatcaaccaaagtagctctgcaaacctttctccctac

SEQ ID NO: 31707 - DNA, 416 bp, Zea mays
  Clone ID: LIB3182-005-P2-M1-A10
catcaatcatcattcatcttagtagtataggcaccaaatcaaatctgcaacatcaattatctaactccaaaaaccatgaagctggtgcttgtggttcttgctttcattgctttagtatcaagtgtttcttgtacacagacaggcggctgcagctgtggtcaacaacaaagccatgagcagcaacatcatccacaacaacatcatccacaaaaacaacaacatcaaccatattattgagaccaacaagcaacatagaaagtggaatccagtagcaacaatagagcaacaatggcgaccaagatattttccctccttatgctccttgctctttctgcatgtgttgctaacgcgacaattttccctcaatgctcacaagctcctatagcttcccttctttccccataccttccatcaat

SEQ ID NO: 31708 - DNA, 413 bp, Zea mays
  Clone ID: LIB3182-005-P2-M1-A11
tagcaacatagaaagcacaatagtgtaccaacaatggcagccaaaatattttgcttccttatgctccttggtctttctgcaagtgttgctaccgcaaccattttcccacaatgctcacaagctcctatagcttcccttcttcccccatacctctcaccagcggtgtcttcaatgtgtgaaaacccaattgttcaaccctacaggatccaacaggcaatcgcaacaggcatcttaccattatcacccttgttcctccaacaaccgtcagccctattacagcagttacctttggtccatttggtggcacaaaacatcagggcacaacaactacaacaacttgtgctagcaaaccttgctgcatactctcagcaacatcagtttcttccattcaaccaactggctgcattgaactc

SEQ ID NO: 31709 - DNA, 131 bp, Zea mays
  Clone ID: LIB3182-005-P2-M1-A12
aaaaaaaaaaaaaaaaaaaaaaaaaaaaaaaaaaaaaaaaaaaaaaaaaaaaaaaaaaaaaaaaaaaaaaaaaaaaaaaaaaaaaaaaaaaaaaaaaaaaaaaaaaaaaaaaaaaaaaaaaaaaaaaaagg

SEQ ID NO: 31710 - DNA, 104 bp, Zea mays
  Clone ID: LIB3182-005-P2-M1-A2
cgatgattgagtaataatgtgtcacgcatcaccatgggtggcagtgtcagtgtgagcaatgacctgaatgaacaattgaaatgaaaagaaaaaagtattgttcc

SEQ ID NO: 31711 - DNA, 327 bp, Zea mays
  Clone ID: LIB3182-005-P2-M1-A3
cacgaaaccctcctgcctcgccgccgcttcctcatcctcccgccgcttagtcccggacccggaccaaccttcgtgaggacgggaattggactaagggggtaggatgccgccaaagaaagcggcgccatcgaaggcggagctggccaagaagcagaaggtcgtggaggacaagaccttcgggctgaagaacaagaataagagcaagaacgtccaaaagtacgtccagtccctgcaccaggccgtccagcccaagcctgactcgaccaagaccgccgccaagaagaagaaggaggaggagaaggcgcgcgagaaggagcttaatgatct

SEQ ID NO: 31712 - DNA, 376 bp, Zea mays
  Clone ID: LIB3182-005-P2-M1-A7
cgcaagcaaagcattttcagccgccccaccgcagcagcagagaagaggccgccgccgccgcgaccaagagccgatggatccgaagatgacagaggtgacccagatgttcgcccgcttcaaggcggcctacacccgcaacgacctcgacgcctgcgtcaccctcctctcacagctcaaggtccatctcaccaaattccccagccttccgccctcatttgagcagacacctaaagccgtggaggagctcaaacttgcaagggacatttatgagcatgctgttgttttgagtgtgaaacttgaggaccaagatgcatttgaacgtgatttctgtcagctaaagccttattacatggatacatgtggcataattcccccc

SEQ ID NO: 31713 - DNA, 258 bp, Zea mays
  Clone ID: LIB3182-005-P2-M1-A8
cagccagctatctgctgccttcttgacacaaccacagttgttgccgttctaccagcacgctgcgcctaacgctggcaccctcttacaactgcaacaattgctgccattcaaccaacttgctttgacaaacccagcagcattctaccaacaacccatcattggtggtgccctcttttagatttcttatgagttatagttcaataataaagttttttgtctgatgtttgtggcttcccagaaataagaaagtacatttct

SEQ ID NO: 31714 - DNA, 357 bp, Zea mays
  Clone ID: LIB3182-005-P2-M1-B1
cttttgtgccttgccccaagagatgagatgaagaaaaaagaagagaagagaggggagatgagggcataccgtcgctcatcatcgtcgttcctctccaagaattggtggctactctccggatcatgcctagtacatctttcttcctcgatgaaggtacttgattcatgttgggaatgagggaagtagcagcacgttcaccttcactattataataacgatgcccagttgcagccatgatttaattagaaactcgatgacaaatgatgtttgttttttcctagtcgtgtgcactggttaattcaggccatgtcggtatgtttaactttgctttgctagcagattaatactgcttcttcc

SEQ ID NO: 31715 - DNA, 199 bp, Zea mays
  Clone ID: LIB3182-005-P2-M1-B10
cgaagccattccctcttcaagaggggatcatcagattgggcttattattccttattactccaagcaaggatcggagttgctcttaattgacttgaccattgccgccaccattgccatgaccaccattgtgaccaagaaccagggaaagctgtccgtaattgcaggccccgccggtggctttcctttggaagccacaagg

SEQ ID NO: 31716 - DNA, 386 bp, Zea mays
  Clone ID: LIB3182-005-P2-M1-B11
cgcgagaccgccggctgctccaggacaggaggaggagcggcttcaattcgtgcccgcgccgcgcgcccaggacccgaccccgctgcctctcccgagggttccaggttctcatcaggtagaggcagaggtcaccttctgctgctcaacgcaacactgcacatacatacatacagatgggttccgaggggccttctcccgtcaccaccaccgtccacgtcactgggttcaagaagttccacggagtcaccgacaaccccaccgagaagatcgtgcgcaacctcgcgtcgttcatggacaccacagggctgcccaagggcctggtgctagggagctgcaccgtactcgaggcacgccaggcagggcgcgcttggaccactgtaccaact

SEQ ID NO: 31717 - DNA, 412 bp, Zea mays
  Clone ID: LIB3182-005-P2-M1-B12
ccaagatgaagatctggttacaaacaatgagcgggagacatttcgtaaactgtttgagaggatcgtatcgtcgtcgtcagacctgtctgagcagagggaagccattaaagagctcaggctgcggactaagtgcaacagttcactaagagcagcgataggagagagaccggattcaatctcgcagatgatttccgtagcgtccagcccagagctagaaaacagtgcagaagttgtggaggatacggtgacagctatccttaatctctctatccacgagagcaacaagaagatcattggagacgacccactggcagtcccgttcctgatcaaggccttacagtcaggaaccatggaggcccggagcaacgccgccgccgccatcttcagcctatccgcgctggacggcaacaag

SEQ ID NO: 31718 - DNA, 314 bp, Zea mays
  Clone ID: LIB3182-005-P2-M1-B3
agatgattagaagcattggcatggcttgttaattagattcgcggttcttagtctaaaatcacattgaagagggagacggacccaagtgatgcagttcatctgttatctgtatcagtctctatttttataagctgtcatatattttctcgaaactatcttgggttgattttgggtgaagggtacttttaatggcacgggccatgtattttccttgggaacgaccatgtggacttaatttttcccccattttctttcctgagatgggctgtgtatttgcttgaaagataaggagtggattatctttgtatttgaac

SEQ ID NO: 31719 - DNA, 409 bp, Zea mays
  Clone ID: LIB3182-005-P2-M1-B5
tctctccccctctctcccccatcgcaccagcaggcgagcgcgaggcggaggagtagagatggagtcggaccagggcaagcttttcatcggcggcatctcctgggaaacgacggaggagaagctgagcgagcacttctccgcctacggcgaggtaacgcaggccgccgtcatgcgcgacaagatcaccggccgcccccgcggcttcgggttcgtcgtcttcgcggatcccgccgccgtcgacagagcgctgcaggacccccacaccctcgacggccgcacggtcgatgtgaagcgggcactctcgcgggaggagcagcaggcctccaaggccgcgaaccctagcggtggaaggaactccggtggcggaagaggcggcggtggcggcagcgatgcaagtggtgctcggacg

SEQ ID NO: 31720 - DNA, 397 bp, Zea mays
  Clone ID: LIB3182-005-P2-M1-B6
ttccgcttctcccgcaaccgcgtcggcgatggcatccgcggcggcggcgaccggcgacggcgagaaggcgcacgcgcacctagggcagcctctcctcgtgccgccgcagccccctcaacaaccctactacgcctacccggccgtctcctacgtgcagcccgccccaccgccgccgccggccccgacgctcgtcttcgtgccgtccccctgctccccgatgctcgtgcgcctccgccgcctgcgcccgcgccgcgcgtcctgcctccgtcgattctgcgcgcgcgcgctcccgctcctcctgttactcgcgctcctcgcggggctcgccttcctcctatacccgtccgtcccggacgcccgcgtcgccgacctccgtgtcgacagttttcgcgcgcag

SEQ ID NO: 31721 - DNA, 410 bp, Zea mays
  Clone ID: LIB3182-005-P2-M1-B7
agaccaacaagcaacatagaaagtggaatccagtagcaacaatagagcaacaatggcgaccaagatattttccctccttatgctccttgctctttctgcatgtgttgctaacgcgacaattttccctcaatgctcacaagctcctatagcttcccttcttcccccataccttccatcaatgatagcttcagtatgtgaaaacccagctcttcaaccctataggctccaacaagcaatcgcagcaagcaacatacctttatcacccttgtttcaacaatcgccagccctatctttggtgcagtcattggtacaaaccatcagggcacagcagctgcagcaactcgtgctacctgtgatcaaccaagtagctctggcaaacctttctccctactctcagcaacaacaatttc

SEQ ID NO: 31722 - DNA, 348 bp, Zea mays
  Clone ID: LIB3182-005-P2-M1-B8
atgacgcttaggcggacgcgtgggcaaagcgagagtgcgtaaagaggatcgcctaacaaaacacaatgaagatggtcatcgctctcgtcttgtgcctggctctgtcagttgacagcacctgtgctatgcatatgccctgcccctgcgctgggctggaggtcttgtacggctctcgaccctgactgacgacgatgatgtgcgcccgttcgctgtacccctacgctgagtacctgaggcagccgtagtgcagtccgcttactacggcgccctactacaccggatgtggactgactagcgccatgttccacacgatccgtcaacagtgatgacagcaatagatgaggatta

SEQ ID NO: 31723 - DNA, 397 bp, Zea mays
  unsure at all n locations
  Clone ID: LIB3182-005-P2-M1-C10
gtcgtgtcttctcgcgctttccactcccaacgagatccatcacccccaacctctgtaagcttcccttgacgtcgtcgtcgtcatccatggagagcaaggacggcacccacgatcccgccacgacggccgcgccaccggccggcgcgccgcatcccgcgatgccttccgcggagacggcgcggtggggcacgcggcagatgggcccgccggcggcccccggggcgcacccggagaaccaggaggcggcgcggtggacggccgcgcgcggggaccaggagctgccgccgtacgtcatcatcggtgagcccgtggcggngccgtcatctccacagcatttgtgcaagggggacagccccatgtagcacatccttcacttttcaacacctggagccgcaag

SEQ ID NO: 31724 - DNA, 376 bp, Zea mays
  Clone ID: LIB3182-005-P2-M1-C11
caccaacgccgagggtgcgcgcacgactccctccgtagtggcgtacaccaagacaggggagcgcctggtggggcagatcgctaagcgccaggcggtcgtgaaccccgagaacaccttcttctctgtcaagcgcttcatcggccgcaagatgtctgaggtcgacgacgaggccaagcaggtctcgtacggcgttgtcaaagacgagaacgggaacgtcaaactcgactgccccggtattggcaaacagttagctgtcgaggagatctatgcgcaagttttgaggaagttggtggatgatgcatctaagtttgttcatgagaaaattacaaaagcactggttacagtacgcgcattacttcaatgattcacaaaggac

SEQ ID NO: 31725 - DNA, 353 bp, Zea mays
  Clone ID: LIB3182-005-P2-M1-C2
tagcaacatagaaagcacaatagtgtaccaacaatggcagccaaaatattttgcctccttatgctccttggtctttctgcaagtgctgctacggcgaccattttcccgaaatgctcgcaagctcctatagcttcccttcttcccccgtacctctcaccagcggtgtcttcggtatgtgaaaacccaattcttcaaccctacaggatccaacaggcaatcacagctggcatcttacctttatcacccttgttcctccaacaatcatcagccctattacattagttacctttggtgcatttattggcacaaaacatcagggcacaacaactacaacaacttgtgctagcaaacct

SEQ ID NO: 31726 - DNA, 360 bp, Zea mays
  Clone ID: LIB3182-005-P2-M1-C3
attgtaaacaactagcagcatatatagcacattcaagctctcaacactggcacacacaatattatgcctccttatactcgttggcctatatgcatgtactggtacggcgaccacatcgccgcaacgctcgaaagctcctatagctctccatctttaccccgtagcctctcaccaccggtgtcttcaggtgtgtgaaatacccaattattcaaccctacatcatccatcacacaatcgcagcatgcatattacctttatgaaccctcgctgtacaacaataataagccctattacaacagttacctctggcgcatttattggcacaaaacataatggcacaacaactactacaacttgtgc

SEQ ID NO: 31727 - DNA, 361 bp, Zea mays
  Clone ID: LIB3182-005-P2-M1-C5
ctgttctcaatggagaaggcattagccagcattagccacgaagatgattcgatcatagagcttgcaaacgaggtgaggaaggtgctcaacagaacaaaggagaccaagatcactggtgccaatgcttccctgaaatcacatgcccctcttgtgcacctgtccgcgcttccagaaggcaccgttgtggactcgagatagcgagagccttggacgttggacctctactcggaatttacttccagctcttgcatgtttgtggccatcatgtactgattttcccttttcaacagttgtcgtgaggctgtatcttctggagttaaaaaaaatgctaaaagccggcactaataatgatattaacttg

SEQ ID NO: 31728 - DNA, 402 bp, Zea mays; identical to SEQ ID NO: 16943
  Clone ID: LIB3182-005-P2-M1-C6

SEQ ID NO: 31729 - DNA, 388 bp, Zea mays
  Clone ID: LIB3182-005-P2-M1-C8
caaccaagtagctgccaggtattgcagcaacaatgttgtcatgatcttaggcagattgagccacaatacattcaccaagcaatctacaacatggttcaatccataatccaggaggagcaacaacaacaaccatgtgagttatgtggatctcaacaagctactcaaagtgcggtggcaatcttgacagcagcacaatacctaccatcaatgtgcggcttgtaccactcatactaccaaaataatccatgcagcagcaatgacattagtggtgtttgcaattgaagaattgtgtctacctagccgttatactcctataacggtgttaagcaataaagtaccatacattatgatgtttgtactatgatatttgaataagaatactaattgt

SEQ ID NO: 31730 - DNA, 397 bp, Zea mays
  Clone ID: LIB3182-005-P2-M1-C9
tgcactacctaagggagatgcgcatcgcgcacttcgtggtgaaggagccgatggtgatcgggcacgagtgcgcgggcgtggtcgaggaggtgggcgccggcgtgacgcacctgtccgtgggcgaccgcgtggcgctggagccgggcgtcagctgctggcgctgccgccactgcaagggcgggcggtacaacctgtgcgaggacatgaagttcttcgccaccccgccggtgcacggctcgctggcgaaccaggtggtgcacccggccgacctgtgctttaagctccccgacggggtgagcctggaggagggcgccatgtgcgagccgctgagcgtgggcgtgcacgcgtgccgtcgcgcgggggtggggcccgagactgacgtgctcttggtgggcgc

SEQ ID NO: 31731 - DNA, 401 bp, Zea mays
  Clone ID: LIB3182-005-P2-M1-D1
gcggcatcagcgtctcggcccctcgcgctcctcgcgtgcacctcggcatctcacggcgctgggcggcgggcgtgggctcgcttggctgtctcttcctattcggcgaggtcggcgctccccaggctccgcgggcgtcggtcgttcgccgcctccgcagggggcgccgtgatggggaacccaggccccggcgccgttgacgccgacgtcgggatggacgccgtccagcggcggctcatgtttgaggacgagtgcattttagtggatgaacaagacaatgtcatcggccacgagtccaagtataacctgccatctcatggagaagatagaagctggaaatgtcctgcacagagctttcagtgttttccctttcaactccaaatatgaattgctactacagcaaa

SEQ ID NO: 31732 - DNA, 120 bp, Zea mays
  Clone ID: LIB3182-005-P2-M1-D10
cggacgcgtggggcggcgatgattgagtaataatgtgtcacgcatcaccatgggtggcagtgtcagtgtgagcaatgacctgaatgaacaattgaaatgaaaagaaaaaagtattgttcc

SEQ ID NO: 31733 - DNA, 309 bp, Zea mays
  Clone ID: LIB3182-005-P2-M1-D11
tttattcataaacacaccaatctaagcgcactatcaacaacctaacatcattggctaccaagatattatcccttcctgcgcttcttgcgcttattgcgagcgcaatatattcttccattattccacaatgctcactagctcctagttacataatattacagtatcgtcttccaattacttatatggccttagaacacccatgtatgcaagccttatatgcttcaacatgcaattgatgggagtgtcttacaacaaccaattgtttaattgcaacaactataccttgattcatcttaacaatacaaacca

SEQ ID NO: 31734 - DNA, 418 bp, Zea mays
  Clone ID: LIB3182-005-P2-M1-D3
aggcaatcgcagcaggcatcttacctttatcacccttgttcctccaacaaccgtcagccctattacagcagttacctttggtgcatttgttggcacaaaacatcaaggcacaacaactacaacaacttgtgctaggaaaccttgctgcctactctcagcaacagcagtttcttccattcaaccaactggctgcattgaactctgctgcttatttgcaacaacaactaccattcagtcagctagctgctgcctacccccagcaatttcttccattcaaccaactggcagcattgaactctgctgcttatttacaacagcaacagctaccaccattcagccagctagctgatgtgagccctgttgccttcttgacacaacaacagttgttgccgttctacctgcacgctgcgcctaacgc

SEQ ID NO: 31735 - DNA, 423 bp, Zea mays
  Clone ID: LIB3182-005-P2-M1-D5
caagcaacatagaaagtggaatacagtagcaacaatagagcaacaatggcggccaagatattttccatccttatgctccttgctctttctgcatgtgttgctaacgcgaccatttttcctcaatactcacaagctcctatagctgcccttcttcccccataccttccatcaatgaccgcttcagtatgtgaaaacccagcccttcaaccctacaggctccaacaagcaatcgcaacaagcaacttacctttatcacccctgttctttcaacaatcgccagccctatctttggtgcagtcattggtacaaaccatcagggcacaacagctgcagcaactcgtgctaccagtgatcagccaagtagctctggcaaacctttctccctactctcagcaacaacaatttcttccattcaaccaactg

SEQ ID NO: 31736 - DNA, 420 bp, Zea mays
  Clone ID: LIB3182-005-P2-M1-D6
gagagacgcacatctatctgtcaagcgacgccgcggcctcgatcagagtcggaggcgaacacccccatggcggcggctggcggcggcgcaggagggaaggtatccttcaagatcatcctcacctccgaccccaagctccctttcaaagtgttcagcgtgcccgaggcggcgccctttaccgcggtgctcaagtacgccgcggaggagttcaaggtcccgccccagaccagcgccatcatcaccaacgatggaattggcatcaacccccagcaaagtgcaggcaacgtgtttctgaaacatggttcggagctgcgtctcatccctcgcgaaagggttggagctgtagtcatgtcttccggttagaggatatatacagtccaatgcataatgagcaaaacttgagagaaataaagctttgat

SEQ ID NO: 31737 - DNA, 403 bp, Zea mays
  Clone ID: LIB3182-005-P2-M1-D8
ggtccatttggtggcacaaaacatcagggcacaacaactacaacaacttgtgctagcaaaccttgctgcatactctcagcaacatcagtttcttccattcaaccaactggctgcattgaactctgctgcttatttgcaacaacaattaccattcagccagctagttgctgcctacccccagcaatttcttccattcaaccaactagcagcattgaactctgctgcttatttacagcagcaacaactactaccattcagccagctagctgatgtgagccctgctgccttcttgacacaacaacagttgttgccgttctacctgcacgctatgcctaacgctggcaccctcttacaactgcaacaattgctgccattcaaccaacttgctttgacaaactcaaca

SEQ ID NO: 31738 - DNA, 336 bp, Zea mays
  Clone ID: LIB3182-005-P2-M1-D9
cagcacagccacagcccacagcccgagaggagaagcgagcgcgcgatccagttggtggccgcccccgcccgcacaccatggctacgccgtggtggtggccgtcgctgctgccggcgtggctgagctccagcgcgctatggttcctcgtcgccaacgcggtcgtcgccgcggtcgccatcttgttcaggcgcccgtcgttgtcgctgtcgttttcccgtcgtcgccttcgctgcagtggttccaccttctcgctcacgcggagagtctcgtctgcgcttctgctgctccttctatccttctccattttttgtcgtcccctccttctgctttatcact

SEQ ID NO: 31739 - DNA, 421 bp, Zea mays
  Clone ID: LIB3182-005-P2-M1-E1
cggacgcgtgggcggacgcgtgggcggacgcgtgggtgcgcttcttgcccttttagtgagcgcaacaaatgcgttcattattccacagtgctcacttgctcctagtgccattattccacagttcctcccaccagttacttcaatgggcttcgaacatccagccgtgcaagcctacaggctacaactagcgcttgcggcgagcgtcttacaacaaccaattgcccaattgcaacaacaatccttggcacatctaaacctacaaaccatcgcaacgcaacagcaacaacagtttctgccatcactgagccacctagccgtggtgaaccctgtcgcctacttgcaacagcagctacttgcatccaacccacttgctctggcgaacgtagctgcataccagcaacaacaacgtctgcaacagttt

SEQ ID NO: 31740 - DNA, 411 bp, Zea mays
  Clone ID: LIB3182-005-P2-M1-E10
attgagaccaactagcaacatagaaagcacaatattgtaccaataatggcagccaaaatattttgcctcattatgctccttggtctttctgcaagtgctgctacggcgagcattttcccgcaatgctcacaagctcctatagcttcccttcttcccccatacctctcaccagcgatgtcttcagtatgtgaaaatccaattcttctaccctacaggatccaacaggcaatcgcagcaggcatcttacctttatcacccttgttcctccaacaatcatcagccctattacagcagttacctttggtgcatttattggcacaaaacatcagggcacaacaactacaacaactcgtgctagcaaaccttgctgcctactctcagcaacagcagttacctttggtgcatttgttg

SEQ ID NO: 31741 - DNA, 415 bp, Zea mays
  Clone ID: LIB3182-005-P2-M1-E11
atttgacctttacagggccttggaagaagaaatgccttgctgaatttgggatcgttacacagtgtgtggcaccaactagagtcaatgatcagtatcttacaaatgtcttgttaaagattaacgcaaagttgggtggcttgaattcgttgctccaaattgaaacatccccagcaattcctctcgtatccaaggtcccaactataatcttgggtatggacgtatcacacggatctcctggacattctgatataccgtctgttgctgctgtaagtatatttttgtctttttctgtgataaataataaatagtggctatgtgacagttttattttgttttcctcaggttgttagttctcgtgaatggcctcttatctcgaaatacagagcatctgtccgcacccaatcaccaaaaatgg

SEQ ID NO: 31742 - DNA, 390 bp, Zea mays
  Clone ID: LIB3182-005-P2-M1-E2
agaccaactagcaacatagaaagcacaatagtgtaccaacaatggcagccaaaatattttgcctccttatgctccttggtatttctgcaagtgctgctacggcgaccattttcccgcaatgctcacaagctcctatagcttcccttcttcccccgtacctctcaccagcggtgtcttcggtatgtgaaaacccaattcttcaaccctacaggatccaacaggcaatcgcagctggcatcttacctttatcacccttgttcctccaacaatcatcagccctattacagcagttacctttggtgcatttattggcacaaaacatcagggcacaacaactacaacaacttgtgctagcaaaccttgctgcctactctcagcaacagcagtttc

SEQ ID NO: 31743 - DNA, 411 bp, Zea mays
  Clone ID: LIB3182-005-P2-M1-E7
gctcgatcgttgcaggtaatggagaaccctgctccgagtatcgtagtgtcccccatcgccgcacctgtatcagcgaacttcagcagactcgccttccgcaacctgtacatccgacggacgggtccagacagcagggagatggtgactgtggagggaagaagaggctctagtgatcagacaggcgacatgaggtacgtgagtgacttccccgtctacgatggccgtggctccgacgccgtcctggtggctcgcgtgcagggcgtcacaaccacgttcgggaactccaaccagttcttcaccgtcgccttcgaggccggcaggctcaagggctccacgctccttaccgaaggagtggtgacggatggatcagatgaatgggcaatctacggcgggaccggagagtttgctatg

SEQ ID NO: 31744 - DNA, 274 bp, Zea mays
  Clone ID: LIB3182-005-P2-M1-E8
cattcagccagctagctggtgtgagccctgctaccttcttgacacaaccacaattgttgccgttctaccagcacgctgcgcctaacgctggcaccctcttacaactgcaacaattgctgccattcaaccaacttgctttgacaaacccaacagcattctaccaacaacccatcattggtggtgccctcttttagatttcttatgagttatagttcaataataaagttttttgtctgatgtttgtggcttcccagaaataagaaagtacatttct

SEQ ID NO: 31745 - DNA, 357 bp, Zea mays
  Clone ID: LIB3182-005-P2-M1-E9
ctagcaacatagaaagcacaatagtgtaccaacaatggcagccaaaatattttgcttccttatgctccttggtctttctgcaagtgttgctaccgcaaccatttttccacaatgctcacaagctcctatagcttcccttctttccccatacctctcaccagcggtgtcttcaatgtgtgaaaacccaattgttcaaccctacaggatccaacaggcattcgcaacaggcatcttaccattatcacccttgttactgcaacaacccgtagccctattacagcagttacctttggtccatttggtggcacaaaacatgatggtacaacatctactacaacttgtgctagcaaaccttgc

SEQ ID NO: 31746 - DNA, 420 bp, Zea mays
  Clone ID: LIB3182-005-P2-M1-F1
agcaaagcggcagtgcgtagagaggatcgtcgaacagaacagcatgaagatggtcatcgttctcgtcgtgtgcctggctctgtcagctgccagcgcctctgcaatgcagatgccctgcccctgcgcggggctgcagggcttgtacggcgctggcgccggcctgacgacgatgatgggcgccggcgggctgtacccctacgcggagtacctgaggcagccgcagtgcagcccgctggcggcggcgccctactacgccgggtgtgggcagacgagcgccatgtaccagccgctccggcaacagtgctgccagcagcagatgaggatgatggacgtgcagtccgtcgcgcagcagctgcagatgatgatgcagcttgagcgtgccgctgccgccagcagcagcctgtacgagccagctctgat

SEQ ID NO: 31747 - DNA, 402 bp, Zea mays
  Clone ID: LIB3182-005-P2-M1-F10
agcaacatagaaagcacaatagtgtaccaacaatggcagccaaaatattttgcctccttatgctccttggtctttctgcaagtgctgctacggcgaccattttcccgaaatgctcgcaagctcctatagcttcccttcttcccccgtacctctcaccagcggtgtcttcggtatgtgaaaacccaattcttcaaccctacaggatccaacaggcaatcacagctggcatcttacctttatcacccttgttcctccaacaatcattagccctattacatcagttacctttggtgcatttattggcacataacatcatggcacaacaactacaacaacttgtgctagcaaaccttgctgtctacctcttataaacagcagtttttttccattcaaccaactagc

SEQ ID NO: 31748 - DNA, 151 bp, Zea mays
  Clone ID: LIB3182-005-P2-M1-F12
gctgtagtatagccgctggctagctagctagttgagtcatttagcggcgatgattgagtaataatgtgtcacgcatcaccatgggtggcagtgtcagtgtgagcaatgacctgaatgaacaattgaaatgaaaagaaaaaagtattgttcc

SEQ ID NO: 31749 - DNA, 419 bp, Zea mays
  Clone ID: LIB3182-005-P2-M1-F2
ggtcttcagaccattagctttatctactccagagcgcagaagaacccgatcgacaccatgagggtgttgctcgttgccctcgctctcctggctctcgctgcgagcgccacctccacgcatacaagcggcggctgcggctgccagccaccgccgccggttcatctaccgccgccggtgcatctgccacctccggttcacctgccacctccggtgcatctcccaccgccggtccacctgccgccgccggtccacctgccaccgccggtccatgtgccgccgccggttcatctgccgccgtcaccatgccactaccctactcaaccgccccggcctcagcctcatccccagccacacccatgcccgtgccaacagccgcattcaagcccgtgccagctgcagggaacctgcggcgttggcag

SEQ ID NO: 31750 - DNA, 422 bp, Zea mays
  Clone ID: LIB3182-005-P2-M1-F4
ggcaatcgcagctggcatcttacctttatcacccttgttcctccaacaatcatcagccctattacaacagttacctttggtgcatttattggcacaaaacatcagggcacaacaactacaacaacttgtgctagcaaaccttgctgcctactctcagcaacagcagtttcttccattcaaccaactaggttcattgaactctgcttcttatttgcaacaacaacaactaccattcagccagctacctgctgcctacccccagcaatttcttccattcaaccaactagcagcattgaactctcctgcttatttacagcagcaacaactactaccattcagccagctagctggtgtgagccctgctaccttcttgacacaaccacagttgttgccgttctaccagcacgttgcgcctaacgctg

SEQ ID NO: 31751 - DNA, 86 bp, Zea mays
  Clone ID: LIB3182-005-P2-M1-F5
atttgatgtaattcaataataaagttttggggatgatgtatgtggacaaccagaaataaaaagttacatttccagattctaatgtt

SEQ ID NO: 31752 - DNA, 422 bp, Zea mays
  Clone ID: LIB3182-005-P2-M1-F6
aaaatatccccaaaccctagctcccgatctcgatggcgaaccctcgcgtcttcttcgacatgaccgtcggcggcgccccggcgggccggatcgtgatggagctgtacgccaacgaggtgcccaagaccgcggagaacttccgcgcgctgtgcacgggcgagaagggcgtgggcaagtccgggaagccgctccactacaagggctccaccttccaccgcgtcatccccgagttcatgtgccagggcggcgacttcacccgcggcaacggcaccggcggcgagtccatctacggcgagaagttccccgacgagaagttcgtgcgcaagcacaccgcccccggtgtgctctccatggccaacgccgggcccaacaccaacggctcccagttcttcatttgcaccgtcgcgaccccttggctcgac

SEQ ID NO: 31753 - DNA, 86 bp, Zea mays
  Clone ID: LIB3182-005-P2-M1-F8
aaaaaaaaaaaaaaaaaaaaaaaaaaaaaaaaaaaaaaaaaaaaaaaaaaaaaaaaaaaaaaaaaaaaaaaaaaaaaaaaaaaaag

SEQ ID NO: 31754 - DNA, 414 bp, Zea mays
  Clone ID: LIB3182-005-P2-M1-F9
ccctcttacaactacaacaattgttgccctttgtccaacttgctttgacaaacccagcagcctcctaccaacaacacatcattggtggtgccctcttttagattgcttattagttgtaattcaataataaagttttctggttggccacatacatcatccaaaaacggacgcgtgggcggacgcgtgggcggacgcgtgggcggacgcgtgggttgagaccaacaagcaacatagaaagtggaatacagtagcaacaatagagcaacaatggcggccaagatattttccatccttatgctccttgctctttctgcatgtgttgctaacgcgaccatttttcctcaatactcacaagctcctatagctgcccttcttcccccataccttccatcaatgaccgcttcagtatgtgaa

SEQ ID NO: 31755 - DNA, 402 bp, Zea mays
  Clone ID: LIB3182-005-P2-M1-G1
cccacgcgtccgtgagcattcagaaacacaccaagcgaagcgcactagcaacgacctaacaacaatggctaccaagatattagccctccttgcgcttcttgccctttttgtgagcgcaacaaatgcgttcattattccacaatgctcacttgctcctagtgccattattccacagttcctcccaccagttacttcaatgggcttcgaacacctagctgtgcaagccaacatgcaacaacaagcgcttgcggcgagcgtcttacaacaaccaattgcccaattgcaacaacaatccttgccacatctaacaatacaagccatcacaacgcaacagcaacaacagttcctaccagcactgagccacctagccatggtgaaccctgccgcctacttgcaagagca

SEQ ID NO: 31756 - DNA, 416 bp, Zea mays
  Clone ID: LIB3182-005-P2-M1-G10
ccagcggataataaaagtaggcaggaattgaagaaagcagcaacttctttcctttctgcagagctgcctgaggactgcaagttttacttggcagacacaaaggatgatttgcataagttcatgtggcttttcaaggagcagcatctttcctcgccacattggagaaaccagagatcttatgttatgtctgagcaggtctgcataaatcctgatgaaaatacgggattgtgcacattgctcgtgtctggatatttgcgggcccacaatctttcagtgaatcagcttgtccatgtttcaggtgctggtgattttcagttaggccaaattgatgtcctcaaggatccatgtcctcttagtgagcggaaaagctctgatgtaatggaaacagaagataatggaattcagattgttaacac

SEQ ID NO: 31757 - DNA, 143 bp, Zea mays
  Clone ID: LIB3182-005-P2-M1-G12
tcgatcctgagcagtgccatgtggaggagccaggcctgcttctgcaccccgtactatgtttgtgcgacctgtacatttcgctcgtagtagagcggttgcgcctgcgctctaatccggaacaaaatactattcatatttgctcc

SEQ ID NO: 31758 - DNA, 402 bp, Zea mays
  Clone ID: LIB3182-005-P2-M1-G2
tttcagcattcagaaacacaccaagcgaagcgcactagcaacaacctaacaacaatggctaccaagatattagccctccttgcgcttcttgcccttttagtgagcgcaacaaatgcgttcattattccacagtgctcacttgctcctagtgccattattccacagttcctcccaccagttacttcaatgggcttcgaacatccagccgtgcaagcctacaggctacaactagcgcttgcggcgagcgtcttacaacaaccaattgcccaattgcaacaacaatccttggcacatctaaacctacaaaccatcgcaacgcaacagcaacaacagtttctgccatcactgagccacctagccgtggtgaaccctgtcgcctacttgcaacagcagctacttgca

SEQ ID NO: 31759 - DNA, 413 bp, Zea mays
  Clone ID: LIB3182-005-P2-M1-G8
cgcacatatctactatactatactctaggaagcaaggacaccaccgccatggcagccaagatgcttgcattgttcgctctcctagctctttgtgcaagcgccactagtgcgacccatattccagggcacttgccaccagtcatgccattgggtaccatgaacccatgcatgcagtactgcatgatgcaacaggggcttgccagcttgatggcgtgtccgtccctgatgctgcagcaactgttggccttaccgcttcagacgatgccagtgatgatgccacagatgatgacgcctaacatgatgtcaccattgatgatgccgagcatgatgtcaccaatggtcttgccgagcatgatgtcgcaaatgatgatgccacaatgtcactgcgacgccgtctcgcagattatgctgca

SEQ ID NO: 31760 - DNA, 410 bp, Zea mays
  Clone ID: LIB3182-005-P2-M1-G9
cctcgtgtggccgtcgtctcccgttcggaacgccaagccccccctccggcgaaatggcccccaagcgaggtggcagggcgccggtgccggccaagaagaagacggataaagtgacgaaccctctattcgagaagaggccgaagcagttcggcatcggcggcgcgttgccgcccaagaaggacctgcaccggttcgtcaagtggcccaaggtcgtgcgtatccagcggcagcgccgcatcctcaagcagcgcctcaaggtaccaccggcgctcaaccagttcacccgcaccctcgacaagaacctcgctacgaacctttttaagatgcttctcaagtaccggcctgaagacaaggctgccaagaaggagaggcttctgaagagggcccaagctgagaatgaaggaaaaact

SEQ ID NO: 31761 - DNA, 420 bp, Zea mays
  Clone ID: LIB3182-005-P2-M1-H1
agcagctacagtatcggaagaagggagtcacatacgggtctgttcaggtgtccaaggatatcaagtatgctgacaatcaaccagtggtgccttggggaccaagattctcccgatcaacagtgaaggacatgcgcataaatatggcagtatcagcatcatttgttgtttggatagctattatgggcaatgcagactggaagcctttgcagttcctatgttttgctttcttctacagaatactacagaagctaagagctactgaaccaccaattactccaatatacaatgaatatggtgaggtcgaaggacgagggataagaatggcaaaaagagtagtccgtgctttgggtttgatatttggatgtgtgttcgctgcattcctgggttatacaacagctattaacttgatcgagctttcaa

SEQ ID NO: 31762 - DNA, 323 bp, Zea mays
  Clone ID: LIB3182-005-P2-M1-H10
ctttccttcccttcccttgttttgatggcgccaccgcgagccgccgccggcgtgtcaattcctgctgatcctgccgccgacagtccagaggcagagtcggagagcaagctgcggcaaggtgcatcagacgcgcggtggctcgaaaccctttccgagccggagctcgatgtgctggtgagcctgagggaagtgaccgaaacgcgggcttccgattgccggccatactgggctggccgacaccgttttccatttccgcgcgctgcgggctctcggggttgaggtcgtggaagagttgtaagagcgcatcaatgcacagttcaatt

SEQ ID NO: 31763 - DNA, 399 bp, Zea mays
  Clone ID: LIB3182-005-P2-M1-H11
gagaccaactagcaacatagaaagcacaatagtgtaccaacaatggcagccaaaatattttgcctccttatgctccttggtctttctgcaagtgctgctacggcgaccattttcccacaatgctcacaagctcctatagcttcccttcttcccccgtacctctcaccagcggtgtcttcggtatgtgaaaacccaattcttcaaccctataggatccaacaggcaatcgcagctggcatcttacctttatcacccttgtttctccaacaatcatcagccctattacagcagttacctttggtgcatttattggcacataacatcagggcacaacaactacaacaacttgtgctagcaaaccttgctgcctactctcagcaacaacagtttctttccatt

SEQ ID NO: 31764 - DNA, 307 bp, Zea mays
  Clone ID: LIB3182-005-P2-M1-H12
gcaacaacagatcataccagcactgaaagaactagatgaagtgaaccctgtatactacttgcaacagcaagtgcttgcatacaacaacactagtacaggcaaacgtagctgcaaaccaacaacaacaacaaatgcaacagtttcagatagtaacaagctaactaaacaaggtgaaccctagacgctaactacaacaacaacaaatgcttataactagccctaacatagtgggaaatgcacctaaatacaagcaacaacaaacgatgaaacagatagaacaactatgaataagatagatgtggaaaac

SEQ ID NO: 31765 - DNA, 422 bp, Zea mays
  Clone ID: LIB3182-005-P2-M1-H2
gtcattgcatgtgttggtgagacacttgagcagagggaggctgggtctaccatggaggttgttgctgcacaaacaaaagcaattgctgagaagatcaaggactggagcaacgtagttgttgcctatgaaccagtttgggctattggaactggtaaagttgccaccccagctcaggctcaggaagtgcacgcctccctgagggattggctaaagaccaacgtcagccctgaggttgctgaatctactaggatcatttacggaggctctgtaactgccgcgaactgcaaagagctagcagcacagcctgatgtcgatgggtttcttgtcggtggagcttctttgaagcctgagttcatcgacatcatcaacgcggccaccgtgaagtccgcttaagatgttacgctgaagacgaacatactttt

SEQ ID NO: 31766 - DNA, 423 bp, Zea mays
  Clone ID: LIB3182-005-P2-M1-H3
tagcaacatagaaagcacaatagtgtaccaacaatggcagccaaaatattttgcttccttatgctccttggtctttctgcaagtgctgctaccgcaaccattttcccacaatgctcacaagctcctatagcttcctttcttcccccatacctctcaccagcggtgtcttcagtatgtgaaaacccaattcttcaaccctacaggatccaacaggcaatcgcagcaggcatcttacctttatcacccttgttcctccaacaaccgtcagccctattacagcagttacctttggtgcatttgttggcacaaaacatcaaggcacaacaactacaacaacttgtgctaggaaaccttgctgcctactctcagcaacagcagtttcttccattcaaccaactggctgcattgaactctgctgcttat

SEQ ID NO: 31767 - DNA, 352 bp, Zea mays
  Clone ID: LIB3182-005-P2-M1-H6
gtctccctccctccttccttccttccccgccactgcgcagcgcgagtgcggcgacagccagtcacacactcccactccctcgaccgctctcggccctcggccccgtccgcgtcgccgcagggcgaggaggcaatggcggcgggcgggaatggcgccggcggggacaccagggcggccttcgcgcggatctacaagacgctcaaggaggagctgctcaccgacccggccttcgagttcaccgaggagtcacgccagtggatcgaccgcatggttgactacaatgtactcggaggcaagtgtaaccgtgggctctctgtggtcgacagctacaagctgctcaaggggcgctgat

SEQ ID NO: 31768 - DNA, 404 bp, Zea mays
  Clone ID: LIB3182-005-P2-M1-H8
cttcagaccattagctttatctactccagagcgcagaagaacccgatcgacaccatgagggtgttgctcgttgccctcgctctcctggctctcgctgcgagcgccacctccacgcatacaagcggcggctgcggctgccagccaccgccgccggttcatctaccgccgccggtgcatctgccacctccggttcacctgccacctccggtgcatcttccaccgccggtccacctgccgtcgccggtccacctgccaccgccggtccatgtgccgccgccggttcatctgccgccgccaccatgccactaccctactcaaccgccccggcctcagtctcatccccagccacacccatgcccgtgccaacagccgtattcaagcccgtgccagctgcagggaacctg

SEQ ID NO: 31769 - DNA, 279 bp, Zea mays
  Clone ID: LIB3182-006-P2-M1-A1
gtacactagcaacatcttagcaccaatgggagccaagatttttgccctccttgccctccttgctctttcagcaagcgctgctacctcgacttttattccacaatgctcacaacaatacctctctccggcgacagccgtgggatttcaatacccaactatacaatcctacatggtacaagaggccatccaagcaagcatcttacggtcattagcattaaccctccaacaaccatatgctctattgcaacagccatccttagtgcatctgtattttcaaag

SEQ ID NO: 31770 - DNA, 429 bp, Zea mays
  Clone ID: LIB3182-006-P2-M1-A10
cagaaacacaccaagcgaagcgcactagcaacaacctaacaacaatggctaccaagatattagccctccttgcgcttcttgcccttttagtgagcgcaacaaatgcgttcattattccacagtgctcacttgctcctagtgccattattccacagttcctcccaccagttacttcaatgggcttcgaacatccagccgtgcaagcctacaggctacaactagcgcttgcggcgagcgtcttacaacaaccaattgcccaattgcaacaacaatccttggcacatctaaacctacaaaccatcgcaacgcaacagcaacaacagtttctgccatcactgagccaccctagccgggtgaaccctgtcgtctacttgcaacagcagctacttgcattcaacccacttgctctggcgaacgtagctgtatacc

SEQ ID NO: 31771 - DNA, 435 bp, Zea mays
  Clone ID: LIB3182-006-P2-M1-A11
aacaagcaacatagaaagtggaatacagtagcaacaatagagcaacaatggcggccaagatattttccatccttatgctccttgctctttctgcatgtgttgctaacgcgaccatttttcctcaatactcacaagctcctatagctgcccttcttcccccataccttccatcaatgaccgcttcagtatgtgaaaacccagcccttcaaccctacaggctccaacaagcaatcgcaacaagcaacttacctttatcacccctgttctttcaacaatcgccagccctatctttggggcagtcattggtacaaaccatcagggcacaacagctgcagcaactcgtgctaccagtgatcagccaagtagctctggcaaacctttttccctactctcagcaacaacaatttctttcattcaaccaactgtttacacttg

SEQ ID NO: 31772 - DNA, 55 bp, Zea mays
  Clone ID: LIB3182-006-P2-M1-A12
atgcgacgttatatcttttctatagtgttatctatatttaaatcactggccgttc

SEQ ID NO: 31773 - DNA, 180 bp, Zea mays
  Clone ID: LIB3182-006-P2-M1-A8
cgatcatccatcgaccgcctcctgctcggcttcccaccccgcctgcctgcgttgcacaccagggaggagctcctccgaccgaccggccatgagctaccaggctccttctccgggcacctcagcctacccgtcgtcgtgcacggtctaccctccgccaggccagccgcaggcgttcccctc

SEQ ID NO: 31774 - DNA, 91 bp, Zea mays
  Clone ID: LIB3182-006-P2-M1-A9
ctggacgtcagcctagcaattagctcatcgactccagattggagaactcgacaccatgaaggtgctgatcgttgcccttgcatttcctggc

SEQ ID NO: 31775 - DNA, 205 bp, Zea mays
  Clone ID: LIB3182-006-P2-M1-B11
attaatttctccaccaatatatcatacacttgattttactagcatgaaggaagaggagctttacgagattgatatccctctgagttttgtagcatctgttggtactagagtacatggattggcttgttggtttgatgtgttgtttaatgggtgcactgtgcaaaggtgtcttactctctgcttctgtatctcttaccacttactg

SEQ ID NO: 31776 - DNA, 419 bp, Zea mays
  Clone ID: LIB3182-006-P2-M1-B12
gcacaaaacatcagggcacaacaactacaacaacttgtgctagcaaaccttgctgcatactctcagcaacatcagtttcttccattcaaccaactggctgcattgaactctgctgcttatttgcaacaacaattaccattcagccagctagttgctgcctacccccagcaatttcttccattcaaccaactagcagcattgaactctgctgcttatttacagcagcaacaactactaccattcagccagctagctgatgtgagccctgctgccttcttgacacaacaacagttgttgccgttctacctgtacgctatgcctaacgctggcacccctttacaactgcaacaattgctgccattcaaccaaactgctttgaccaactcaacagtgttttaccaacaaaccatcttttgtgg

SEQ ID NO: 31777 - DNA, 305 bp, Zea mays
  Clone ID: LIB3182-006-P2-M1-B2
gaccaacaagcaacatagaaagtggaatccagtatcaacaatagagcaacaatggagaccaagatattttccctccttatgctccttgctctttctacatgtgttgcttactcgacaattctccctaaatgctcacatgtttcttattgcttccttttttcccctcttcctattattatttactagtcttcttttttgttatcctctctcttttcttcatatcttctttattcttctttttttactctgtttttatttcttttactattctttttgttttataatttttctaattctcttttcct

SEQ ID NO: 31778 - DNA, 126 bp, Zea mays
  Clone ID: LIB3182-006-P2-M1-B4
gaaagaagaaaagagagaagcccggaaagcgaagaaagagctcaaaggcctgtataaatcagaaacgcagaaggctcagaaagttgctgctgtcactggaccttcttccattcgactaatgtgatg

SEQ ID NO: 31779 - DNA, 335 bp, Zea mays
  Clone ID: LIB3182-006-P2-M1-B6
cggacgcgtgggttcagaaacacaccaagcgaagcgcactagcaacaacctaacaacaatggctaccaagatattatccctccttgcgcttcttgcgctttttgcgagcgcaacaaatgcgttcattatttcacaaagctcacttggtcctaggtccattatttcacaggttcttccaccagttacttcaaaggccttcgaacacccaactgggcaagcctataggctacaacaagcgattgcggggagcgttttacaacaaccaattggtcaattgcaacaacaatttctggtacatttaacaatacaaaaccattgtacgcaacaacaacaac

SEQ ID NO: 31780 - DNA, 428 bp, Zea mays
  Clone ID: LIB3182-006-P2-M1-C2
caaatgcgttcattattccacaatgctcacttgctcctagtgccattattccacagttcctcccaccagttacttcaatgggcttcgaacacctagctgtgcaagccaacatgcaacaacaagcgcttgcggcgagcgtcttacaacaaccaattgcccaattgcaacaacaatccttgccacatctaacaatacaagccatcacaacgcaacagcaacaacagttcctaccagcactgagccacctagccatggtgaaccctgccgcctacttgcaagagcagctgcttgcatccaacccacttgctctggcgaacgtagttgcaaaccagctacaacaacagctacaacagtttctgccaacgctcagtcaactagccatggtgaaccctgccgcctaccgacaacaacaacaactggtttcattt

SEQ ID NO: 31781 - DNA, 142 bp, Zea mays
  Clone ID: LIB3182-006-P2-M1-C3
atgctacttcatatcttttctatagtttcacttaatattatttacttgtctgttttttttttttattcttattattttttattgtttattttattatgtattttatttttattttcattattattactttatttagtttttt

SEQ ID NO: 31782 - DNA, 81 bp, Zea mays
  Clone ID: LIB3182-006-P2-M1-C7
aaaaaaaaaaaaagaagggggaggaggaaaaaaaaaaaaaggaaaaaaagaaagaataaaaaaaaaaaaaaaaggaggaag

SEQ ID NO: 31783 - DNA, 275 bp, Zea mays
  Clone ID: LIB3182-006-P2-M1-D10
gaccaactagcaacatagaaagcacaatagtgtaccaacaatggcagccaaaatattttgcttccttatgctccttggtctttctgcaagtgctgctaccgcaaccattttcccacaatgctcacaagctcctatagcttcctttcttcccccatacctctcaccagcggtgtcttcagtatgtgaaaacccaattcttcaaccctacaggatccaacaggcaatctcagcaggcatcttacctttatcacccttgttccttcaacaaccgttag

SEQ ID NO: 31784 - DNA, 185 bp, Zea mays
  Clone ID: LIB3182-006-P2-M1-D12
tattattgagaccaactagcaacatagaaagcacaatagtgtaccaacaatggcagccaaaatattttgcctccttatgctccttggtctttctgcaagagctgatacggcgaccatttttccgcaatgctcgcatgctcctatagtttatcttctttctccgtacctatctccagctgtttttt

SEQ ID NO: 31785 - DNA, 140 bp, Zea mays
  Clone ID: LIB3182-006-P2-M1-E1
cagaaacacaccaagcgaagcgcactagcatcaacctaacaacaatggctaccaagatattagccctccttgcgcttcttgcccttttagtgagcgcaacatacgcgctcattatttcacagcgctcaccttgtctctag

SEQ ID NO: 31786 - DNA, 93 bp, Zea mays
  Clone ID: LIB3182-006-P2-M1-E10
taacattgtaaaggattacgcatgagtctggatatcatttacaaccaagaccgctgcccaattaccatcgtgatgttgtcaataccattcata

SEQ ID NO: 31787 - DNA, 64 bp, Zea mays
  Clone ID: LIB3182-006-P2-M1-E11
aacaagtaacatataaagtgttatcctgtagcaactaaattagcaacatatcctaccaaaatat

SEQ ID NO: 31788 - DNA, 189 bp, Zea mays
  Clone ID: LIB3182-006-P2-M1-E12
cagaccattagctttatctactccagagcgcagaagaacccgatcgacaccatgagggtgttgctcgttgccctcgctctcctggctctcgctgcgagcgccacctccacgcatacaagcggcggctgcggctgccagccaccgccgccggttcatctaccgccgtcggtgcatctgccaccttcggtt

SEQ ID NO: 31789 - DNA, 68 bp, Zea mays
  Clone ID: LIB3182-006-P2-M1-E2
gcatgcctgtgcacttctccatcaccaccactgggttttcagaccattagctttatctactccagagc

SEQ ID NO: 31790 - DNA, 296 bp, Zea mays
  Clone ID: LIB3182-006-P2-M1-E3
aaagaatacgagtaaataagatatatataaacagagagggggagaacaaaataacaaataaagccaataataaaaaaaaaaaataacaaaaaaaagaaaaaaaaaaaaaataaaaaaaaaaaaagaagaaagagaaaaaaaaaaaaatgaaaaaaggaaaaaaagaaaacaagatgaaaaaaaaaagaaaaaaaaaaaagagaaggagtaaaaaaaaaaagaaaaaaaaaaaataaaaaaagaaagacgaaaaagaaaaaaaaaataaaaaaaagaaagacgaatagaggaagagg

SEQ ID NO: 31791 - DNA, 87 bp, Zea mays
  unsure at all n locations
  Clone ID: LIB3182-006-P2-M1-F12
atgcgacgaaatagaatatctatagggncacctaaattcaaatcactggccgccgtttacaacttcgtgaccgtgattaccctgaca

SEQ ID NO: 31792 - DNA, 71 bp, Zea mays
  Clone ID: LIB3182-006-P2-M1-F6
tcgtatcagtgcagcccgacggcgactccctactgctcgtcttagtgcctgatgttgttgccttagtgcta

SEQ ID NO: 31793 - DNA, 117 bp, Zea mays
  Clone ID: LIB3182-006-P2-M1-G10
ggtcttcagaccattagctttatctactccagagcgcagaagaacccgatcgacaccatgagggtgttgctttttgtcctcgctctcctggctctcgctgcgagcgccacctccacg

SEQ ID NO: 31794 - DNA, 125 bp, Zea mays
  Clone ID: LIB3182-006-P2-M1-G11
cgcagcacagccatggggaagcagctctgcgacatgcaccgctcgcgccgccgcgcccgtattgttgtcgtcgctctcctctcccgcttgctgtcgccccgtcttctcactttgttaaattattt

SEQ ID NO: 31795 - DNA, 150 bp, Zea mays
  Clone ID: LIB3182-006-P2-M1-G12
gccgcggatatcctggtcaacttctttgacaaatgcaagggagatccgagctactgggacaagatctcacaaggcggcctgcagagaatctatgagaagtacacctggaagctctactccgagaggctgatgaccctgaccggcgtgtac

SEQ ID NO: 31796 - DNA, 258 bp, Zea mays
  Clone ID: LIB3182-006-P2-M1-G2
cgccttctccttctcccccctagtctagaggcgtttgctccccaatcccttcggcccgcccgctcgacgtgatcccaccggcagccatggatccatacaagcaccgcccgtctagtgggagcaactccagcttctggaccaccaactccggcgcccccgtctggaacaacaactctgccctcaccgtcggacagcgaggtccaatcctccttgaggattatcatctaatcgaaaagcttgctcagttcgacagagaac

SEQ ID NO: 31797 - DNA, 56 bp, Zea mays
  Clone ID: LIB3182-006-P2-M1-G6
gtatacaagctgtaaatctcgcctagctcgttgacggagaccaaggagaagagcat

SEQ ID NO: 31798 - DNA, 63 bp, Zea mays
  Clone ID: LIB3182-006-P2-M1-G8
tgttcatgccattttttatttatttttagtgtttcttttctatttttctgttgtttttttttt

SEQ ID NO: 31799 - DNA, 94 bp, Zea mays
  Clone ID: LIB3182-006-P2-M1-H10
tcgcacaccaagcgaagcgcactatcatcaagctaacaacaatggctaccaagattttagcccttccttgcgcttcatgcctttttagagagcg

SEQ ID NO: 31800 - DNA, 87 bp, Zea mays
  Clone ID: LIB3182-006-P2-M1-H11
tcggaaaattcaagaaacagcgaggaatctcatggacgagcacagcaaagataccatagtcttagttactgagaaggattatgaccg

SEQ ID NO: 31801 - DNA, 187 bp, Zea mays
  Clone ID: LIB3182-006-P2-M1-H7
caacaagcaacatagaaagtggaatacaggagcaacaatagagcaacaatggcggccaagatattttccatccttatgctccttgctctttctgcatgtggtgctaacgcgaccatttttcctcaatactcacaagctcctaatggtggccttttttccccatacctttcattaatgaccggtttag

SEQ ID NO: 31802 - DNA, 374 bp, Zea mays
  Clone ID: LIB3182-008-P2-M1-A1
ttttgagcattcagaaacacaccaagcgaagcgcactagcaacgacctaacaacaatggctaccaagatattagccctccttgcgcttcttgccctttttgtgagcgcaacaaatgcgttcattattccacaatgctcacttgctcctagtgccattattccacagtttctcccaccagtttcttcagatgggctaagaacaactaggtgcgcacggcaacatgcatcaacaagctgttgaggcgagcgggttacaacaaccaattgcccaattgcaacaacaatccttgccacatctaacaatacaagccatcacaacgcaacagcaacaacagttcctaccagcactgagccacccaaccatggggaaccct

SEQ ID NO: 31803 - DNA, 397 bp, Zea mays
  Clone ID: LIB3182-008-P2-M1-A11
gaccaacaagcaacatagaaagtggaatgcagtagcaacaatagagcaacaatggcggccaagatattttccatccttatgctccttgctctttctgcatgtgttgctaacgcgaccatttttcctcaatactcacaagctcctatagctgcccttcttcccccataccttccatcaatgaccgcttcagtatgtgaaaacccagcccttcaaccctacaggctccaacaagcaatcgcaacaagcaacttacctttatcacccctgttctttcaacaatcgccagccctatctttggtgcagtcattggtacaaaccatcagggcacaacagctgcagcaactcgtgctaccagtgatcagccaagtagctctggcaaacctttctccctactctc

SEQ ID NO: 31804 - DNA, 583 bp, Zea mays
  unsure at all n locations
  Clone ID: LIB3182-008-P2-M1-A12
ctatagagagaaagctaggtaccagcctgcagagtaccagagtccgagaattccccgggtcagaccccacagcgtcccgcatattaagcttcatcagacttccatgattagagagagactcagacatccatagaagagtagctagatcagttagccccttagctttctcctaggcagctcagctagcagaggcagccagcctcccagtaccaagcaggcaggctagtaggctagccatgacatccatccagtttcattctacccgcnnctccagttctatatagccagcctttccagttcttatctagcccgccagcatgcatgcatgcccgcatgccataggcatatacccccatctcataccaccagcatgctatatgcccgtagccagcaagttcaggaatcctagcgagcgtcaggcaaggcagtcgagcaagcccagttcctagggcccagtgcagtcgaagttcctagagagcaccaagtagcagcnccggctggcgactgcccctactggatctgccacatgtgccaaggcgcttgcagcagcatgtgctgccacccatatcatggcaggtggagc

SEQ ID NO: 31805 - DNA, 371 bp, Zea mays
  Clone ID: LIB3182-008-P2-M1-A2
cgcaaagcggccaggtcgcggggctgttggcggcgcagatagcgcagcaactgacggcgatgtgcggcctgcagcagccgactccatgcccctacgctgctgccggcggtgtcccccactgaagaaactatgtgctgtagtatagccgctggctagctagctagttgagtcatttagcggcgatgattgagtaataatgtgtcacgcatcaccatgggtggcagtgtcagtgtgagcaatgacctgaatgaacaattgaaatgaaaagaaaaaagtattgttccaaaaaaaaaaaaaataaaaaaaaaaaaaaaataaaaaaaaaaaaaaaataaaaaaattttttataaaaattaaaaaaataaataaaa

SEQ ID NO: 31806 - DNA, 254 bp, Zea mays
  Clone ID: LIB3182-008-P2-M1-A5
cctagcaattagctcatcgactccagattggagaactcgacaccatgaaggtgctgatcgttgcccttgctctcctggcgctcgctgcgagcgccgcctccagtacaagcggcggctgtggctgccagacaccaccgtttcatctaccgcctccgttctatatgccgtctccgttctatctgccgccgcagcagcagccgcagccatggcaataccccactcaaccaccgcagcttagcccgtgccagcagttc

SEQ ID NO: 31807 - DNA, 204 bp, Zea mays
  Clone ID: LIB3182-008-P2-M1-A8
gcggccgccctttttttttttttttaaaatatagatctctaatactttattactgagaggtcgcacatatcagcatgagaactttattattacagtataaatcataaaaaatctagaagatggcaccaccaatggtgggcggttgcaatatggtggtaggatttttctaagcttgttgtctaaatggtatcaattgctggtgat

SEQ ID NO: 31808 - DNA, 101 bp, Zea mays
  Clone ID: LIB3182-008-P2-M1-A9
tcaaagcggcagtgcgtagagaggatcggggatcataacagcatgaagatggtcatcgtcctcgtatagtgcctgtcctctgtcatatgtcaactccttta

SEQ ID NO: 31809 - DNA, 401 bp, Zea mays
  Clone ID: LIB3182-008-P2-M1-B1
caacaagcaacatagaaagtggaatccagtagcaacaatagagcaacaatggcgaccaagatattttccctccttatgctccttgctctttctgcatgtgttgctaacgcgacaattttccctcaatgctcacaagctcctatagcttcccttcttcccccataccttccatcaatgatagcttcagtatgtgaaaacccagctcttcaaccctataggctccaacaagcaatcgcagcaagcaacatacctttatcacccttgtttcaacaatcgccagccctatctttggtgcagtcattggtacaaaccatcagggcacagcagctgcagcaactcgtgctacctgtgatcaaccaagtagctctggcaaacctttctccctactctcagcaacaaca

SEQ ID NO: 31810 - DNA, 350 bp, Zea mays
  Clone ID: LIB3182-008-P2-M1-B10
cgcagaagcaccgaaaggtgtcacctctgctcgccttcgccttcaccttcaccttcaccttcaaatgtgactcggcttggcgcaaggggaatgaactccaggagacaggagcagcaggctcggcggaccatcagagcgctgctggccaagaacggagcgctgtgcacaggtgtttggagatgcaggagcggaggcgcagatatagcctcgcgagccccgacgatggccaccgccgcggtgtcggtcgacgagaagctcgacaagcttcgcgccgaggtcgccaagctcgaccagatcagccagaacgagaagtccgggttcattagcctcgtgttacgctacctcagtgg

SEQ ID NO: 31811 - DNA, 112 bp, Zea mays
  Clone ID: LIB3182-008-P2-M1-B11
tctgcgcggcagctgataggcgagcccagagtagcagcatgcatgctgaccggcagatagtagcggccctagcagctagcaagcatgccaagagtccctagccccttagcaa

SEQ ID NO: 31812 - DNA, 363 bp, Zea mays
  Clone ID: LIB3182-008-P2-M1-B12
tcagaccattagctttatctactccagagcgcagaagaacccgatcgacaccatgagggtgttgctcgttgccctcgctctcctggctctcgctgcgagcgccacctccacgcatacaagcggcggctgcggctgccagccaccgccgccggttcatctaccgccgccggtgcatctgccacctccggttcacctgccacctccggtgcatctcccaccgccggtccacctgccgccgccggtccacctgccaccgccggtccatgtgccggcgtcggttcatctgccgccgtcaccattccacttcccttctcaaccggcccgggcttagtctcatccccagccacacccatgcccgtgcca

SEQ ID NO: 31813 - DNA, 311 bp, Zea mays
  Clone ID: LIB3182-008-P2-M1-B2
accaactcccatcattaaaagcacactagcgctccaacaatggccgctcaatagattgtgcctgcttatgctccttgggctttctgcaagagctgctacggccaccaatctgtcccacaagagctcacaagactcctatagcgtgcccttgtttccacccgtaccttctcaccagccggggtcataaggtatggtgaaaacccaaattgttcaagccctataggatccaacaggcaaatcgcagctggcatcttacctttatcacccttgttcctccaacaataatcagccctattacagcagttaccttt

SEQ ID NO: 31814 - DNA, 241 bp, Zea mays
  Clone ID: LIB3182-008-P2-M1-B3
gcagaatgacatgttccgcctgaactatggctaaaagacagccgaaaactcttgtgatgaacgaatttgttaagggcttcatgttgagacgatgaataccgactgtcgccgctactctcatctcctttgtatctcctctgttggctgattaactgttattacaagaaattgctggacttgttttttccagttgttttgaattatgtattatggttggatgggcacctatttatttgtggga

SEQ ID NO: 31815 - DNA, 160 bp, Zea mays
  Clone ID: LIB3182-008-P2-M1-B4
aagcaagggaatcacatcgccatggcagccaagatgtttgcattgtttgcgctcctagctctttgtgcaaccgccactagcgctacccatatcccagggcacttgccaccactactgatgccattggctaccatgaacccatggacgcacctctgcctgt

SEQ ID NO: 31816 - DNA, 370 bp, Zea mays
  Clone ID: LIB3182-008-P2-M1-B5
ggcaggtggagccgctgcaccggtaccaggcgacatacggtgtggtcctgcagtccttcctgcagcagcagccgcagggcgagctcgcggcgctgatggcggcccaggtagcgcagcagctgacggcgatgtgcggcctgcagctgcagcagccaggtccctgcccttgcaacgcagctgccggcggtgtctactactgaggaaactatgtactgtagtaataatgtaatggagccgctgactagctacctagctcgctagtttactcatttagcggcgatgagtaacgtagtgtcacccatcaccatgggtggcagagtgagcaatgacctgaatgaaccattgaaatggaaaggaattatttttatgg

SEQ ID NO: 31817 - DNA, 192 bp, Zea mays
  Clone ID: LIB3182-008-P2-M1-B6
tgccgttctaccagcacgctgcgcctaacgctggcaccctcttacaactgcaacaattgctgccattcaaccaacttgctttgacaaacccagcagcgttctaccaacaacccatcattggtggtgccctcttttagatttcttatgagtcatagttcaattataaagtcttttgtctgatgctcgatgctt

SEQ ID NO: 31818 - DNA, 410 bp, Zea mays
  Clone ID: LIB3182-008-P2-M1-B8
agaaacacaccaagcgaagcacattagcaacaacctaacaacaatggctaccaagatattatccctccttgcgcttcttgcgctttttgcgagcgcaacaaatgcgttcattattccacaatgctcacttgctccaagttccattattacacagttcctcccaccagttacttcaatgggcttcgaacacccagctgtgcaagcctataggctacaacaagcaattgcggcgagcgtcttacaacaaccaatttcccagttgcaacaacaatccttggcacatctaacaatacaaaccatcgcaacgcaacagcaacaacaattcctaccagcactgagccacctagccatggtgaaccctgccgcctacttgcaacagcagttgcttgcatcaaacccacttgctctgg

SEQ ID NO: 31819 - DNA, 277 bp, Zea mays
  Clone ID: LIB3182-008-P2-M1-B9
aaaaaaaaaaaaaaaaaaaaaaaaaaaaaaaaaaaaataaaaaaaaaaaaataaaaaaaaaataaaataaataaaaaaaaaaaataaaataaaaaaaaaaaaataaaaaaataaaaaaaaaaaaaaaaaaatataatttaataaaataaattaaaaaaataataaaataatatatttgggggggcccttttttaaatacctcattttttctacctttcttttaatcattatttttcttttttttgcacccctattttttattctttggctccttttt

SEQ ID NO: 31820 - DNA, 345 bp, Zea mays
  Clone ID: LIB3182-008-P2-M1-C1
acggtctccctcttcctgtcagtagtagagtgagagtgaggcagcgagtgggagacaaggggaaatggggaagggagcgcaagggagcgatgcggcggcggcgggcggcgaggtggaggagaacatggcggcgtggctggttgccaagaacaccctcaagatcatgcccttcaagctcccgcccgtcggcccttatgatgtccgcgtgcgcatgaaggcagtggggatttgcggcagcgatgtgcactacctaagggagatgcgcatcgcgcacttcgtggtgaaggagccgttggtgatcgggcacgagtgcgcggtcgtggtctaggaggtgggctcctgctt

SEQ ID NO: 31821 - DNA, 179 bp, Zea mays
  Clone ID: LIB3182-008-P2-M1-C10
aagcaagggaatcacatcgccatggcagccaagatgtttgcattgtttgcgctcctagctctttgtgcaaccgtcactagtgctacccatatcccagggcacttgtcaccactactgatgccattggctaccatgaacccatggatgcagtactgcatgaagcaacagggggccgccat

SEQ ID NO: 31822 - DNA, 313 bp, Zea mays
  Clone ID: LIB3182-008-P2-M1-C11
gcggccgcccttttttttttttttttggaacaatacttttttcttttcatttcaattgttcattcaggtcattgctcacactgacactgccacccatggtgatgcgtgacacattattactcaatcatcgccgctaaatgactcaactagctagctagccagcggctatactacagcacatagattcttcagtgggggacaccgccggcagcagcgtaggggcatggagtcggttgctgcaggccgcacatcgtcgtcagttgctgggctatttgcgccgtcaacagccccgcgatctggcctctttgcggct

SEQ ID NO: 31823 - DNA, 398 bp, Zea mays
  Clone ID: LIB3182-008-P2-M1-C12
ctagcaacatagaaagcacaatagtgtaccaacaatggcagctaaaatattttgcctccttatgctccttggtctttctgcaagtgctgctacggcgaccattttcccacaatgctcacaagctcctatagcttcccttcttcccccgtacctctcaccaacggtgtcttcggtatgtgaaaacccaattcttcaaccctacaggatccaacaggcaatcgcagctggcatcttacctttatcacccttgttcctccaacaatcatcagccctattacagcagttacctttggtgcatttattggcacaaaacatcagggcacaacaactacaacaacttgggctagcaaaccttgctgcctactctcaacaacagcagtttcttccattcaaccaac

SEQ ID NO: 31824 - DNA, 187 bp, Zea mays
  Clone ID: LIB3182-008-P2-M1-C3
agaactcagtatagagcgatctagaaagtagaactgtgcatgtcaatttcccatcatgaacaatctcaaagtctggtaccctgattatgtcattaatatgatggtagtgatgtcgcccaaaagatagtgaatgcgatcatactagttgcccttgacttctgtctcaagtgcacccatacctagaagg

SEQ ID NO: 31825 - DNA, 225 bp, Zea mays
  Clone ID: LIB3182-008-P2-M1-C5
ccttgagtcctcattccaacgggtgccacgatgtgtgtacacttcaacttgcttgtacgagtacaggggttgggactcgaaagccgcaaacgccacacaccgacggtttacttggggtctcaggccaatggaacggcacgcggtggtcttctacatctccgatttccagtccgggctgcgagcactggtcagggcaggatcctgcgcgcgcgtgaccccatacgt

SEQ ID NO: 31826 - DNA, 195 bp, Zea mays
  Clone ID: LIB3182-008-P2-M1-C6
tccacgcgtccgggggaccgaactggggctgggggagctgaattggggccatggaaccattgttaacactgacactggcacctacctggttgagttcgaacatcttttctgaattattgcgctttaatgacttaactaggtatgttgccagtggcttattctacagcacataatttttttagtgggggacaccct

SEQ ID NO: 31827 - DNA, 135 bp, Zea mays
  Clone ID: LIB3182-008-P2-M1-C7
gttctagaataggaggggccagttgtgtggatctctgtgttctaacttattaatactccttagctctttggatttttcgcttcttttttactttaattattttattattcgttattagatcttattttttaattt

SEQ ID NO: 31828 - DNA, 386 bp, Zea mays
  Clone ID: LIB3182-008-P2-M1-C8
cggacgcgtgggctgggtcttcagaccattagctttatctactccagagcgcagaagaacccgatcgacaccatgagggtgttgctcgttgccctcgctctcctggctctcgctgcgagcgccacctccacgcatacaagcggcggctgcggctgccagccaccgccgccggttcatctaccgccgccggtgcatctgccacctccggttcacctgccacctccggtgcatctcccaccgccggtccacctgccgtcgccggtccacctgccaccgtcggtccatgtgccgccgccggttcatctgccgtcgtcaccatgccactaccctactcaaccgccccggcctcagcctcatccccagccacacccatgcccgtgccaaca

SEQ ID NO: 31829 - DNA, 341 bp, Zea mays
  Clone ID: LIB3182-008-P2-M1-D1
tactactaccatttggccagctagctacaacaagccccgcttccttcttgacacaacaacaattgcttccgttctaccagcagtttgtggctaaccccgcaacccttttacaactgcaacagttgctgccctttgtccaacttgctttgacaaacccagcagccttctaccaacaacacatcattggcggtgccctcttttagattgcttattagttgtcattcaataatgaagttttttggctgatgtatgtggcctcctagaaataagaagttatatttccaaaaaaaaaaaattaaaaaaataaaattaaaaaaaaaaaaaatattaaaaaaaataag

SEQ ID NO: 31830 - DNA, 398 bp, Zea mays
  Clone ID: LIB3182-008-P2-M1-D10
caactagcaacatacatagtgaagtacactagcaacatcttagcaccaatgggagccaagatttttgccctccttgccctccttgctctttcagcaagcgctgctacctcgacttttattccacaatgctcacaacaatacctctctccggcgacagccgtgggatttcaatacccaactatacaatcctacatggtacaagaggccatccaagcaagcatcttacggtcattagcattaaccctccaacaaccatatgctctattgcaacagccatccttagtgcatctgtatctccaaagaatcgcggcacaacaactacaacaacagttgctaccaacaatcaatcaagtagttgcagcgaaccttgctgcttacctccagcaacaacagtttct

SEQ ID NO: 31831 - DNA, 186 bp, Zea mays
  Clone ID: LIB3182-008-P2-M1-D2
cgcctttgcccgcacacacggctcccattccatttccgctgcctgcctctgacgcgcacccacaccacctcgcctccctcaggcctccgcagatcgggctctgcttgcgttgcgttgagtgtgtatgtagcggtcccgccactctactaatttctagtagaccctgtttggtttttttccgattcc

SEQ ID NO: 31832 - DNA, 387 bp, Zea mays
  Clone ID: LIB3182-008-P2-M1-D3
gcaacatagaaagcacaatagtgtaccaacaatggcagccaaaatattttgcctccttatgctccttggtctttctgcaagtgctgctacggcgaccattttcccgcaatgctcgcaagctcctatagcttcccttcttcccccgtacctctcaccagcggtgtcttcggtatgtgaaaacccaattcttcaaccctacaggatccaacaggcaatcgcagctggcatcttacctttatcacccttgttcctccaacaatcatcagccctattacaacagttacctttggtgcatttattggcacaaaacatcagggcacaacaactacaacaacttgtgctagcaaaccttgctgcctactctcagaacagcagttctttcattca

SEQ ID NO: 31833 - DNA, 403 bp, Zea mays
  Clone ID: LIB3182-008-P2-M1-D4
caacaagcaacatagaaagtggaatacagtagcaacaatagagcaacaatggcggccaatatattttgcatccttatgctccttgctctttctgcatgtgctgctaacgcgaccatttttcctcaatactcacaagctactatagctgcccttcttcccccataccttccatcaatgaccgcttcagtatgtgaaaacccagcccttcaaccctacaggctccaacaagcaatcgcaacaagcaacttacctttatcacccctgttctttcaacaatcgccagccctatctttggtgcagtcattggtacaaaccatcagggcacaacaactgcagcaactcgagctaccagtgatcagccaagtagctctggcaaacctttctccctactcttagcaacaac

SEQ ID NO: 31834 - DNA, 396 bp, Zea mays
  Clone ID: LIB3182-008-P2-M1-D7
cctaccagcactgagccacctagccatggtgaaccctgccgcctacttgcaacagcagttgcttgcatcaaacccacttgctctggcaaacgtagttgcaaaccagccacaacaacagctgcaacagtttctgccagcgctcagtcaactagccatggtgaaccctgccgcctacctacaacagcaacaactgctttcatctagcccgctcgctgtggccaatgcacctacatacctgcaacaacaattgttgcaacagattgtaccagctctgactcagctagttgtggcaaaccctgctgcctacttgcaacagctgcttccattcaaccaactgactatgtcgaactctgctgcgtacctacaacagcgacaacagttacttaatccactagc

SEQ ID NO: 31835 - DNA, 67 bp, Zea mays
  Clone ID: LIB3182-008-P2-M1-D8
tcgcatgacaacatatgaagtgccttacagtggtgacccctgtcgactactggcggctactatattt

SEQ ID NO: 31836 - DNA, 249 bp, Zea mays
  unsure at all n locations
  Clone ID: LIB3182-008-P2-M1-D9
gcggccgccctttttttttttttttttttanccacctatgtggtgtttcgacaggggaattaatggcgtctccttttattatcttccccctctcttttttttcttattcttatttttttaccttattctattaatttttttcatcgccagctccgtgaccttctgcttgcctttgtggttcattcctcactacccgcttccgtgcttccttttgttcttatatcatgctctcctttcttcttttctccc

SEQ ID NO: 31837 - DNA, 381 bp, Zea mays
  Clone ID: LIB3182-008-P2-M1-E1
cgcaaattgcaccaagaaatccatcgagaggccgtcgacaggggaattaatggcgtcgtcgtctagcagcagccaccgccgcctcatcctcgcagccgccgtcctgctctccgtgctcgcggctgccagcgccagcgccgggacctcctgcgtgccggggtgggccatcccgcacaacccgctcccgagctgccgctggtacgtgaccagccggacctgcggcatcgggccgcgcctcccgtggccggagctgaagaggagatgctgccgggagctggcggacatcccggcgtactgccggtgcacggcgctgagcatcctcatggacggggcgatcccgccgtgcccggacgcgcagctggagggccgcctagaggacct

SEQ ID NO: 31838 - DNA, 320 bp, Zea mays
  Clone ID: LIB3182-008-P2-M1-E3
gggtcttcagaccattagctttatctactccagagcgcagaagaacccgatcgacaccatgagggtgttgctcgttgccctcgctctcctggctctcgctgcgagcgccacctccacgcatacaagcggcggctgcggctgccagccaccgccgccggttcatctaccgccgccggtgcatctgccacctccggttcacctgccaccttcggtgcatctcccaccgccggtccacctgccgtcgccggtccacctgtcaccgtcggtccatgtgccgtcgtcgtgtcatctgccgccgtcaccatgccactaccctactc

SEQ ID NO: 31839 - DNA, 396 bp, Zea mays
  Clone ID: LIB3182-008-P2-M1-E4
attttgagcattcagaaacacaccaagcgaagcgcactagcaacgacctaacaacaatggctaccaagatattagccctccttgcgcttcttgccctttttgtgagcgcaacaaatgcgttcattattccacaatgctcacttgctcctagtgccattattccacagttcctcccaccagttacttcaatgggcttcgaacacctagctgtgcaagccaacatgcaacaacaagcgcttgcggcgagcgtcttacaacaaccaattgcccaattgcaacaacaatccttgccacatctaacaatacaagccatcacaacgcaacagcaacaacagttcctaccagcactgagccacctagccatggtgaaccctgccgcctacttgcaagagcagc

SEQ ID NO: 31840 - DNA, 311 bp, Zea mays
  Clone ID: LIB3182-008-P2-M1-E5
gttttgagcttccataaacactccaagggacgagcactagcataagcctaacatcaatgtctaccaagatattatcactccttgcgctttttgtccttattgtgagcgcaacaaatgcgtttattattccacaatgctcacttgcttctagtgccatttttccacatttccttccaccagttacttcaatggtctgtttacatctagtcttgcatagctaacttgcttcatcatgctcttggtgtatgcggcttacaacaatccattatttccttagtgcatcatctatttcttgtcatattttacattac

SEQ ID NO: 31841 - DNA, 194 bp, Zea mays
  Clone ID: LIB3182-008-P2-M1-E7
tcggcagtagatacatcaccgccgacgtgctgcatgcggcctgccaggcgctcgccctcgacgacatacatctgttatacttgaaccgaaaagcaattcactgaccccccttttacaacgtcttgactgagataaccctgtcgttacccaacctaatcttctttcagcatcatccccctttctccaactgatct

SEQ ID NO: 31842 - DNA, 362 bp, Zea mays
  Clone ID: LIB3182-008-P2-M1-E8
cagaaacacaccaagcgaagcgcactagcaacaacctaacaacaatggctaccaagatattatccctccttgcgcttcttgcgctttttgcgagcgcaacaaatgcgtccattattccacaatgctcacttgctcctagttccattattccacagttcctcccaccagttacttcaatggccttcgaacacccagctgtgcaagcctataggctacaacaagcgattgcggcgagcgtcttacaacaaccaattgcccaattgcaacaacaatccttggcacatttaacaatacaaaccatcgctacgcaacagcaacaacagtttctaccagcactgagccacctagccatggtgaaccct

SEQ ID NO: 31843 - DNA, 292 bp, Zea mays
  Clone ID: LIB3182-008-P2-M1-F1
gatgtagtcacctacacaatatccatgccaaactatgttgttggaggtattcgtagaaatctggagcagacacagtacagctcatccagttcaagtggatacagtccatgtgcccgttctaaagtactacagcaacagataatatttggagggcagaatgaccagcacgaggacacacattatgactctgatgaagcagaaagcaaactctctcttctagaacctgaggactcagttaatgaagataattttgcggctgtgctttcacaatttaacgatgcccacatcatag

SEQ ID NO: 31844 - DNA, 340 bp, Zea mays
  Clone ID: LIB3182-008-P2-M1-F11
attttgattcgtatcaagcagcttcaggtgtctctggttattttggcttcaaaatatgttgacttaatagtcccaggttatacccatctgcaaagggcgcagcctgttctgctgccacatcttctcttatcatatgttgaacagttggagcgtgatgctggtcggctggtcaactgcagggagcgaatgaatttctgtcctcttggtgcttgtgctttggctggaactggacttcccattgataggtttcaaactgctaaagatttgaaatttacagcttcaattgaataatatcattgatgtattatcaaacccctcactttgaacttgtaatccttgc

SEQ ID NO: 31845 - DNA, 372 bp, Zea mays
  Clone ID: LIB3182-008-P2-M1-F12
gcaacatagaaagcacaatagtgtaccaacaatggcagccaaaatattttgcctccttatgctccttggtctttctgcaagtgctgctacggcgaccattttcccgaaatgctcgcaagctcctatagcttcccttcttcccccgtacctctcaccagcggagtcttcggtatgtgaaaacccaattcttcaaccctacaggatccaacaggcaatcacagctggcatcttacctttatcacccttgttcctccaacaatcatcagccctattacatcagttacctttggtgcatttattggcacaaaacatcagggcacaacaactacaacaacttgtgctagcaaaccttgctgcctactctcagcaaca

SEQ ID NO: 31846 - DNA, 369 bp, Zea mays
  Clone ID: LIB3182-008-P2-M1-F2
gagcattcagaaacacaccaagcgaagcacattagcaacaacctaacaacaatggctaccaagatattatccctccttgcgcttcttgcgctttttgcgagcgcaacaaatgcgttcattattccacaatgctcacttgctccaagttccattattacacagtttctcccaccagttacttcaatgggcttcgaacacccagctgtgcaagcctataggctacaacatgcaattgcggcgagcgtcttacaacaaccaattttccagttgcaacaacaatccttggcacatctaacaatacaaaccatcgcaacgcatcagcatcaacaatttctaccagttctgagccatcttgccatggtgaaccct

SEQ ID NO: 31847 - DNA, 275 bp, Zea mays
  Clone ID: LIB3182-008-P2-M1-F4
gaccattagctttatctactccagagcgcagaagaacccgatcgacaccatgagggtgttgctcgttgccctcgctctcctggctctcgctgcgagcgccacctccacgcatacaagcggcggctgcggctgccagccaccgccgccggttcatctaccgccgccggtgcatctgccaccttcggttcacctgccacctccggtgcatcttccaccgccggtccacctgccgcctccggtccacctgccaccgtcggttcatgttcccgcgccgg

SEQ ID NO: 31848 - DNA, 323 bp, Zea mays
  Clone ID: LIB3182-008-P2-M1-F5
gagaccaactagcaacatagaaagcacaatagtgtaccaacaatggcagccaaaatattttgcttccttatgctccttggtctttctgcaagtgctgctaccgcaaccattttcccacaatgctcacaagctcctatagcttcctttcttcccccatacctctcaccagcggagtcttcagtatgtgaaaacccaattcttcaaccctacaggatccaacaggcaatcgcagcaggcatcttacctttatcacccttgatccttcaacaaccgtcagccctattacagcagtcacctttggtgcattcgttggctcataacat

SEQ ID NO: 31849 - DNA, 156 bp, Zea mays
  Clone ID: LIB3182-008-P2-M1-F6
ctcatctgcatacacggtctccctcttcctgtcagtactagagtgcgagcgcggcagcgagtcggacacaaggtgaaatggggacacctttcttcaattcacttgccttcgttttacaacatttctgactcttaaaaccttgctatttcccttctt

SEQ ID NO: 31850 - DNA, 358 bp, Zea mays
  Clone ID: LIB3182-008-P2-M1-F9
cctagtccctacgaccctactccctaccgcacgccaccgcccaccagcgccgccgaggggcaaggccgaaccctcctccgttcgccgaggcggagcacgcccttccaggccagcttccaccggagcaagagctaagtcgcctcgaattcttcccagctagtagcgtgtgccgtaccccgtcgctcaaccgggatggcgtcgagtggggatccgcccggatctgctgatgagaagaaaactccaatatccgaagggtcttccgacgaacgtcaagggcttcctccagcaggcttttcaaatccttttgatcttggttatatgcaaaggtagctcaactgatccatctattatggatatg

SEQ ID NO: 31851 - DNA, 62 bp, Zea mays
  Clone ID: LIB3182-008-P2-M1-G10
atgccacgtcacatgtattgtatagtgtcacctaacttcaatccactggccgtagatctaca

SEQ ID NO: 31852 - DNA, 60 bp, Zea mays
  Clone ID: LIB3182-008-P2-M1-G11
ctccaaggccagcgacgttcgccggcggcgcggtcgaagagatggccgcagcggctcacg

SEQ ID NO: 31853 - DNA, 397 bp, Zea mays
  Clone ID: LIB3182-008-P2-M1-G12
ccttaaacagatattgtcacaggaaactcagtatcttcctgtcacaagaggttgcaatgctgttctcctagtgaatggattaggagccactcctatcatggaacttatgattgcagcgagaaaagcagttcctgagttgcaattggtgtatggcattgctgttgacagagtctacactggcacacttatgacatcacttgatatggcaggattatctattaccattatgaagtccggcgaaagcattttgaagagacttgatgctcccactaaagctccagcttggcctgttggttctgaaggaaaccgtccaccagcaaagtttcctgttcctctaccaccatcaccttcaatgaaggatgacgagattcttgctccatctcaggagctgagcaag

SEQ ID NO: 31854 - DNA, 324 bp, Zea mays
  Clone ID: LIB3182-008-P2-M1-G3
gctagatatggggggacatacatattcacagtgacaacacccccagaccaagagatggaggttgaacatctagtgcgtcagttctcgcccagcgcaaacaagatctaccatctatctggaactcagaaattcgagctgccgaagcaagaggtgaaaatagcccatgtttttgacatggtcgagaaggcgaagcgccggctctcaatacatgcctggggactggtcgacacgaccttagaggacgtcttcatcaaggtcgccagaggagcacaagtgttcaacgagtttgcgtagattacacctttaggactgccttcgtagcaa

SEQ ID NO: 31855 - DNA, 406 bp, Zea mays
  Clone ID: LIB3182-008-P2-M1-G5
aacatccttctatcagtaccatcaatcatcattcatcttagtagtataggcaccaaatcaaatctgcaacatcaattatctaactccaaaaaccatgaagctggtgcttgtggttcttgctttcattgctttagtatcaagtgtttcttgtacacagacaggcggctgcagctgtggtcaacaacaaagccatgagcagcaacatcatccacaacaacatcatccacaaaaacaacaacatcaaccaccaccacaacatcaccagcagcagcaacaccaacaacaacaagttcacatgcaaccacaaaaacatcagcaacaacaagaagttcatgttcaacaacaacaacaacaaccgcagcaccaacaacaacaacaacaacagcaccaacaacaacatcaatgt

SEQ ID NO: 31856 - DNA, 400 bp, Zea mays
  Clone ID: LIB3182-008-P2-M1-G6
cagtcgcacatatctactatactatactctaggaagcaaggacaccaccgccatggcagccaagatgcttgcattgttcgctctcctagctctttgtgcaagcgccactagtgcgacccatattccagggcacttgccaccagtcatgccattgggtaccatgaacccatgcatgcagtactgcatgatgcaacaggggcttgccagcttgatggcgtgtccgtccctgatgctgcagcaactgttggccttaccgcttcagacgatgccagtgatgatgccacagatgatgacgcctaacatgatgtcaccattgatgatgccgagcatgatgtcaccaatggtcttgccgagcatgatgtcgcaaatgatgatgccacaatgtcactgcgacgccgtc

SEQ ID NO: 31857 - DNA, 395 bp, Zea mays
  Clone ID: LIB3182-008-P2-M1-G7
gcttgcatcaaacccacttgctctggcaaacgtagttgcaaaccagccacaacaacagctgcaacagtttctgccagcgctcagtcaactagccatggtgaaccctgccgcctacctacaacagcaacaactgctttcatctagcccgctcgctgtggccaatgcacctacatacctgcaacaacaattgttgcaacagattgtaccagctctgactcagctagatgtggcaaaccctgctgactacttgcaacagatgctttcattcaaccaactgactatgtcgaactctgctgtgtacctacaacagcgacaacagttacttaattcactagcagcggctaacccattgagtgctggctttctacagcagtaacaaatgctgccatacaacc

SEQ ID NO: 31858 - DNA, 352 bp, Zea mays
  Clone ID: LIB3182-008-P2-M1-G9
cgccccagcgctggctcagccaccaccagccgcagcaggcagtgggaatcctgggcaagcgccccgcaggagaagaggaggcagcgcgctctccgtccgccatggcgggctcttccgaccccgacaagctcatgagcaaagccgacaaactaacaaaattgagttttacaagatggaatgctgattggaaaagcgctacctccttgtatgagcaagctgcaattgcgtataggttcagaaaggacaatgagaaagcaaaagatgcttttgagaaggccccaaaaggacaggatatgatcttctcaccatgggacgctggtaagcatatggaatttgctggtgcttttagcaa

SEQ ID NO: 31859 - DNA, 406 bp, Zea mays
  Clone ID: LIB3182-008-P2-M1-H1
catcaccagcacattccaagaaatcgcgggaagcaaggacaccgtggggcagtacgagtcccacatcgcgttcactcttcctgggctctaccgtgtcgtccatggcatcgatgttttcgatcccaagttcaacattgtctctcctggagcagacatgagtgtttactacccgtatacggaaaccgacaagagactcactgccttccatcctgaaatcgaggagctcatctacagcgacgtcgagaactccgagcacaagttcgtgcttgaggacaagaagaagccgatcattttctcgatggcgcgtcttgaccgcgtgaagaacatgacaggccctggggagatgtacggcaagaacgcgcgcctgagggagctggcgaaccctgtgatcgtcgccggtgaccac

SEQ ID NO: 31860 - DNA, 66 bp, Zea mays
  Clone ID: LIB3182-008-P2-M1-H2
ttatatccagcacattccatgaaatcgcgggaagtatggacaccgaggcgcagctctagttccact

SEQ ID NO: 31861 - DNA, 411 bp, Zea mays
  Clone ID: LIB3182-008-P2-M1-H3
gttatagataaagagcaatcgttctccaacaatgcaagttacaatcttgtgcctgcttatgcttattgtgttttattagaggagctgaactcaagaccatgttcgcacaatgataacaagctgctatggcttacctttttccccacgcacctctaaccaactgggtcttcagcatgctataacccaatggctgtaaccctacagaagccaacagggaacggcatttggaatgttaccttatatcagcctggttcctgcaacaagcattagacctattacagaagttaccttggagggatttattggcacaaaacatcagggcacaacaactacaacatcttgtgctagcaaaccttgctgccttactctcagcaacagcagtttcttccattctaccaactagctgcattg

SEQ ID NO: 31862 - DNA, 374 bp, Zea mays
  Clone ID: LIB3182-008-P2-M1-H4
gtcgcagagaagctgaggtctgactacgactttggccacactttgcatgccaaccacctcccacgtggtgatgcagcagtggaacggccattggtcaggctgctgaagccatttgatgagcttgttgttgacagcaaggattttgatgtcgctgcactgatgaagtttattgatgctagcaccatccctagagttgtcacttttgacaagaaccctgacaaccacccatacctcatgaaattcttccaaagctcagcccccaaggctatgctgtttttgaacttctccaccggaccttttgattctttcaagtctgcctactctgctgccgcggaggaattcaaggacaaggaaatcaagttccttattggtga

SEQ ID NO: 31863 - DNA, 200 bp, Zea mays
  unsure at all n locations
  Clone ID: LIB3182-008-P2-M1-H5
tcgggccaagtcgcggggctgttggcggggcaaattaggcagcaactttccgcggatttgtggctttcaaaaaccatttattgccctacctgtttgcgggtgnnnggaatgagaactatggctgagatagcgtggtagnnnatgtgagtatttacgggatgatggtataatggtacgcataccatggggaggcattgtat

SEQ ID NO: 31864 - DNA, 294 bp, Zea mays
  Clone ID: LIB3182-008-P2-M1-H8
gcaacagctaccaccattcagccagctagctgatgtgagccctgttgccttcttgacacaacaacagttgttgccgttctacctgcacgctgcgcctaacgctggcaccctcttacaactgcaacaattgctgccattcaaccaacttgctttgacaaacccaacagcgttctaccaacaacccatcattggtggtgccctcttttagattgcttatgagttatagttcaataatgaagttttttggatgatgtttgtggcttcccagaaatatgaaagttcattttttaaatt

SEQ ID NO: 31865 - DNA, 281 bp, Zea mays
  Clone ID: LIB3182-009-P2-M1-A1
gagaccaacaaggagcatagaaagtggaatacaggagcaacaatggagcaacaatggtgaccaatatatttgcccttcgtatgctccgtgctctttgtacacgcgacgctaacgcgacaatgttcactcaatgctaacaagctcctattgcttccattctttccatatacgttagattaattataggttcagcatgtgaaaacacagcttttgaaccatataggcttcaacaagcgatagctacatgcatcatacctgtatcgaccttggtgtgcaacaat

SEQ ID NO: 31866 - DNA, 291 bp, Zea mays
  Clone ID: LIB3182-009-P2-M1-A10
tgcagaatcccgcgaaccatcgagtttttgaacgcaagttgcgcccgaagccttctggcggagggcacgtttgcctgggcgtcacgccaaaagacacttccaacacccccccgcggggcgagggacgtggcgtctggccccccgcgccgcacggcgaggtgggccgaatcaggggctgccggcgaaccgtgcctagcgcaaaacgtggtgcgcaacatcaatttgatcgatttcgcacactgaaccgtgactgggacgcgcactctatcgtaacgtcacattcagcgaccg

SEQ ID NO: 31867 - DNA, 397 bp, Zea mays
  Clone ID: LIB3182-009-P2-M1-A11
ctgttgctgagagtaggcagcagcagtttgttccattcaaccaactagctgcattgaactctgcttattatttgcaacaacaacaactaccattcagccagctacctgctgcctacccccagcaatttgttgcattgaaccaactggcagcattgaactctcctgcttatttacagcagcaacaactactaccattcagacagctagctggtgtgagccctgctaccttcttgatacaaccacaggtgttgccgttctaccagcacgctgcgcctaacgctggcaccctgttacaactgcaacaattgctgccattcaaccaacttgctttgacaaacccaggagcgttctaccaacaacccatcattggtggtgccctcttttagatttcttatga

SEQ ID NO: 31868 - DNA, 409 bp, Zea mays
  Clone ID: LIB3182-009-P2-M1-A12
caacaagcaacatagaaagtggaatccaggagcgacaatttagcaacaatggagaccaacaaattttcccttcttatgctccttgctctttctacatgtgttgcttacgcgacaatttttccttaatgctcacaagcttctatagcttccctttttcccccatacctttcattaattatagcttcagtatgtgaaaacccaggtcttgaaccatataggcttcaacaagcaattgcagcaagcaacatacctttatcgcccttgttgtgtcaacaaattggcaggcctatttttggtgcagacattggtacaaaccattagggcacaacagctgcaggaacttgtggtacctgtgatcaaccaaatagctttggcaaaacctttttcctattttcggaacaacaatttt

SEQ ID NO: 31869 - DNA, 271 bp, Zea mays
  Clone ID: LIB3182-009-P2-M1-A4
gtaggttcctatgagagaaccggttacagtgctcagggaacgggatctactttgatcatgccaggactggacaatcaactaaaatcaccaagtcctctattactccctgtcagggatgctgtcacaccattgtccgagtcagaggccatcgatctagttaaggacgtgttcgcatctgcaactgagagagacatctacactggagacaagttggaaattgtagtcattaacatggccggtactatgcgcgagtatatcgacctgagaaagg

SEQ ID NO: 31870 - DNA, 253 bp, Zea mays
  Clone ID: LIB3182-009-P2-M1-A5
acgaatagtgaagtacactagcaacatgttagcaccaatgggagccaagatttttgccctccttgccctccttgctctttcagcaagcgctgctacctcgacttttattccacaatgctcacaacaatacctctctccggcgacagccgtgggatttcaatacccaactatacaatcctacatggtacaagaggccattcaagcaagcatcttacggtcattagcattaacccttcaacaaccatatgctcta

SEQ ID NO: 31871 - DNA, 297 bp, Zea mays
  Clone ID: LIB3182-009-P2-M1-A6
ctcgcttcccttcccttcccccacccccggccctttcctccccgccttatttcttgcccacgagctggacgagccagctgctgcgtttcgttcatccgagcggcgcgtgcgccgtgctcgtttcctcttcctccacacgagacgcggacgcctcgctgagaacgggaggggctgctttgttgctgtagataccgggcgagggcggcgtgatctcggtttcgacgccgcgggcgggacgcgatggctttgtgaccttcttgttcttttcttgacgcccccccccgaccgagttcaggc

SEQ ID NO: 31872 - DNA, 199 bp, Zea mays
  Clone ID: LIB3182-009-P2-M1-A7
gcgatcaataaggaatatagaaagtgtgggagtcaagcaacaatggagaacaactattcaccaaaacatatactctcttgataatcttaatgctttgtacacgtgttgcgatcacgctactgttcactaagatgctacaggactcctatatcttccattttttccacatatattttataaaatatatgtcaagcgtgtg

SEQ ID NO: 31873 - DNA, 346 bp, Zea mays
  Clone ID: LIB3182-009-P2-M1-A8
cggacgcgtgggcagcattcagaaacacaccaagcgaagcgcactagcaacaacctaacaacaatggctaccaagatattagccctccttgcgcttcttgcccttttagtgagcgcaacaaatgcgttcattattccacagtgctcacttgctcctagtgccattattccacagttcctcccaccagttacttcaatgggcttcgaacatccagccgtgcaagcctacaggctacaactagcgcttgcggcgagcgtcttacaacaaccaattgcccaattgcaacaacaatccttggcacatctaaacctacaaaccatcgcaacgcaacagcaacaacagtttc

SEQ ID NO: 31874 - DNA, 399 bp, Zea mays
  Clone ID: LIB3182-009-P2-M1-B1
cggacgcgtggcttggtacaacgtcttcctcttcctgtcaataatagagggagagtgaggcacccagtgggagacaaggggaaatggggaaggtatgtcaagggaccgtattcccttgagtttgattccacagtggtaacaaaaatgcctatctccgtggacagacgaacaatctcaatacccaactattcaatcctacatggtacaagatgtcattcaagcaagcatattacgggcattagtatgaaccctgcaacaaccatatgctctattgtaacatacatccttagtgcatttttatcttcaaagaattggtgcacaacaactaccacaccagttgctatcaaccatctattaagtatcttgcagcgaaccttgtttgtttacctcagcaaacaa

SEQ ID NO: 31875 - DNA, 412 bp, Zea mays
  Clone ID: LIB3182-009-P2-M1-B11
agcattcagaaacacaccaagcgaagcgcactagcaacaacctaacaacaatggctaccaagatattagccctccttgcgcttcttgcccttttagtgagcgcaacaaatgcgttcattattccacagtgctcacttgctcctagtgccattattccacagttcctcccaccagttacttcaatgggcttcgaacatccagccgtgcaagcctacaggctacaactagcgcttgcggcgagcgtcttacaacaaccaattgcccaattgcaacaacaatccttggcacatgtaaacctacaaaccatcgcaacgcaacagcaacaacagtttctggcatcacttgaccacctagccgtggtgaaccctgtcgcctacttgcaacagcaggttcttgcattcaacccatttgc

SEQ ID NO: 31876 - DNA, 359 bp, Zea mays
  Clone ID: LIB3182-009-P2-M1-B12
cgtttcgcgtccgcctcaacccgccgcaaggagaggtaagttcaggagacatcttcgagaagctgaaatggctcctaaagctgctcctgccaagaagggtgatgccaagacccacgccttgaaggttgccaaggctgtgaagtcttgggcagacaagaagaataccaagaagatccgcacgtctgtgacatttcaccgccccacgaccctgaagaaggctagggaccccaagtacccacgaattagtactaccggaaggaacaagcttgatcagtaccaaattcttaagtacccccttaccacaaaatcagcgatgaagaagattgaagataacaacactctggtcttcattgttgacc

SEQ ID NO: 31877 - DNA, 422 bp, Zea mays
  unsure at all n locations
  Clone ID: LIB3182-009-P2-M1-B2
tccttctatcagtaccatcaatcatcagtcatcttagtagtataggcaccaaatcaaatctgcaacatcaattatctaactgcaaaaaccatgaagctggcgcttgtggttcttgctttcattgctttagtatcaagtgtttcttgtacacagacaggcggctgcagctgtggtcaacaacaaagccatgagcagcaacatcatccacaacaacattatgcacaaaaacaacaacatcaaccaccaccacaacattaccagcagcaggaacaccaacaacaacaagttcacatgcaaccacaaaaacatnagcaacaacaagaagttcatgttcaacaacaacaacaacaaccgggggaccaacaacaacaacaacaacagcgccaacaacaacattaatgtggaggccaacaacaacatta

SEQ ID NO: 31878 - DNA, 390 bp, Zea mays
  Clone ID: LIB3182-009-P2-M1-B3
attttgagcattcagaaacacaccaagcgaagctacctagcaacgacttaacaacaatggctaccaagatattagccctccttgcgcttcttgccctttttgtgagcgcaacaaatgcgttcattattccacaatgctcacttgctcctagtgccattataccacagtttctccgaccagttacttcaatgggcttcgaacacctagctgtgcaagcctacaggctacaacaagcgcttgcggcgagcgtcttacaacaaccaattaaccaattgcaacaacaatccttggcacatctaaccatacaaaccatcgcaacacaacagcaacaacagtttctaccagcactgagccaactagatgtggtgaaccctgtcgcctactttgaac

SEQ ID NO: 31879 - DNA, 313 bp, Zea mays
  Clone ID: LIB3182-009-P2-M1-B4
gccatcatggacgccgacctaaacaagaatgtgccatgggacctgccgatcaaggagaaaaagggcgacaaagagtgctacttgttctaccagaacgaccccaagttcccgacggagctgagggcgaaccgcgccaactaggacgggtactggaaggagacgggcgaggacaacgaggtgtacaacgccgcggaacgggtggcggtactgatcaccatgaagatgaacctcggcttgtacacgggcggggataccacaagtgacaagatcaactgaggcatgctcgaatacaggctgtaaggcagcggcaggc

SEQ ID NO: 31880 - DNA, 345 bp, Zea mays
  Clone ID: LIB3182-009-P2-M1-B6
ctagcaacatagaaagcacaatagtgtaccaacaatggcagccaaaatattttgcttccttatgctccttggtctttctgcaagtgctgctaccgcaaccattttcccacaatgctcacaagctcctatagcttcctttcttcccccatacctctcaccagcggtgtcttcagtatgtgaaaacccaattcttcaaccctacaggatccaacaggcaatcgcagcaggcatcttacctttatcacccttgttcctccaacaaccgtcagccctattacagcagttacctttggtgcatttgttggcacaaaacatcaaggcacaacaactacaacaacttgtgct

SEQ ID NO: 31881 - DNA, 420 bp, Zea mays
  Clone ID: LIB3182-009-P2-M1-C1
gaaagcacaatagtgtaccaacaatggcagctaaaatattttgcctccttatgctccttggtctttctgcaagtgctgctacggcgaccattttcccacaatgctcacaagctcctatagcttcccttcttcccccgtacctctcaccaacggtgtcttcggtatgtgaaaacccaattcttcaaccctacaggatccaacaggcaatcgcagctggcatcttacctttatcacccttgttcctgcaacaatcatcagccctattacagcaggtacctttggtgcatttattggcacaaaacatcagggcacaacaactacaacaacttgtgctagcaaaccttgctgtctactcttagcaacagcagtttcttccattcaaccaactagctgcattgaactcttgttcttatttgcaac

SEQ ID NO: 31882 - DNA, 205 bp, Zea mays
  Clone ID: LIB3182-009-P2-M1-C11
gttcaaacttctgtaaataatgtcatcaatgatgtactcggttcctgtgaggtattcgaggaaaagcaagtaggcaatgaaagattcaacatatttagtggctgcccttctggccagacagcgactattgttctacgcggtggtgcccaccatttcattgcgggagctgcatgaagttttcatgatgccatcatgattgtaaggg

SEQ ID NO: 31883 - DNA, 171 bp, Zea mays
  Clone ID: LIB3182-009-P2-M1-C12
cggacgcgtgggcgacgaggacgaccgacgacgcacgcagagatccggcgtactgcaaattttgaaaactgaactgttagatggcatcagcagagctttcccgtgaggaaaatgtgtacatggcgaagctcgccgagcaggcggagaggtacgaggagatggttgagttca

SEQ ID NO: 31884 - DNA, 387 bp, Zea mays
  Clone ID: LIB3182-009-P2-M1-C2
caactagcaacatagaaagcacaatagtgtaccaacaatggcagccaaaatattttgcttccttatgctccttggtctttctgcaagtgttgctaccgcaaccattttcccacaatgctcacaagctcctatagcttcccttcttaccccatacctctcaccagcggtgtcttcaatgtgtgaaaacccaattgttcaaccctacaggatccaacaggcaatcgcaacaggcatcttaccattatcacccttgttccttcaacaaccgtcagccctattacagcagttacctttggtccatttggtggcacaaaacattaaggcacaacaactacaacaacttgggctagcaaaccttgctgcatactctcagcaacatcagtttct

SEQ ID NO: 31885 - DNA, 419 bp, Zea mays
  Clone ID: LIB3182-009-P2-M1-C3
caactagcaacatagaaagcacaatagtgtaccaacaatggcagccaaaatattttgcctccttatgctccttggtctttctgcaagtgctgctacggcgaccattttcccgaaatgctcgcaagctcctatagcttcccttcttcccccgtacctctcaccagcggtgtcttcggtatgtgaaaacccaattcttcaaccctacaggatccaacaggcaatcacagctggcatcttacctttatcacccttgtttctccaacaatcatcagccctattacatcagttacctttggtgcatttattggcacaaaacatcagggcacaacaactacaacaacttgtgctagcaaaccttgctggctactctcagcaacagcaagtttttccattcaaccaactagctgcattgaactctg

SEQ ID NO: 31886 - DNA, 268 bp, Zea mays
  Clone ID: LIB3182-009-P2-M1-C4
cgaagccattccctcttcaagaggggatcatcagattgggcttattattccttattactccaggcaaggatcggagttgctctgaattgactgaaccatggcggcgacaatggcagtgacgacgatggtgacgaggagcaaggagagctggtcgtcattgcaggtcccggcggtggcattcccttggaagccacgaggtggcaagaccggcggcctcgagttccctcgccgggcgatgtttgacagcgttggcctcaacgtgtgcccg

SEQ ID NO: 31887 - DNA, 143 bp, Zea mays
  Clone ID: LIB3182-009-P2-M1-C5
gcaggatagaacatagtgttgttggagttcgttctcggataggctccaatgtgcacctcaaggatactgtaatgcttggcgctgattattatgaaactgccgcggaacgaggagagctgcttgcataacgaaaagttcctatt

SEQ ID NO: 31888 - DNA, 118 bp, Zea mays
  Clone ID: LIB3182-009-P2-M1-C6
agaccattagctttatctactccagagcgcagaagaacccgatcgacaccatgagggtgttgctcgttgccctctctctcctggctctcgctgagagcgccacctccacgcatacaag

SEQ ID NO: 31889 - DNA, 370 bp, Zea mays
  Clone ID: LIB3182-009-P2-M1-C9
ctcgacctcttgcgccgccgccatgaccttcaagcgccgcaacggcggccgcaacaagcatggccgcggtcacgtcaagtacatccggtgctcaaactgcgccaagtgctgccccaaggacaaggcgatcaagaggtttcaggtgaggaacatcgtggaacaggcggccatcagggacgtccaggaagcatgcgtctatgatggctacgtcctcccgaagctgtacgccaaggtgcaccactgcgtttcgtgcgcgatccacgctcacattggccgcgtccgatcccgtgagaagcgcaaggacccgaagccgtcggagcgcttaagcgcatggaggataggcctgctggtggacaaggagggcccccgc

SEQ ID NO: 31890 - DNA, 376 bp, Zea mays
  Clone ID: LIB3182-009-P2-M1-D1
ctggcgcttgagaccataaactcaatatgctacagagagtagaaaaaacctaacgacaccgtgtggcaggatgttagccctccttgcgcttcttgccctttttgtgagcgcaacatatgcgcatattatttcacaatgctgacttgctcctagtgccattattccacagttgctgccaccagatacttcaatgggcttcgaacacctagctgtgcaagccaacatgcaacaacaagcgctttgtgagagcgtcttacaacaaccaattgcccaattgcaacaacaattcttgccacatctaacaatacaagccatcacaacgcaacagcaacaacagtttctaccagcactgaaccacctagccatggtgaaccct

SEQ ID NO: 31891 - DNA, 346 bp, Zea mays
  Clone ID: LIB3182-009-P2-M1-D2
caacaagcaacatagaaagtggaatccagtagcaacaatagagcaacaatggagaccaagatattttccctccttatgctccttgctctttctacatgtgttgctaacgcgacaattttccctcaatgctcacaagctcctatagcttccctttttcccccataccttccatcaattatagcttcagtatgtgaaaacccagctcttcaaccatataggcttcaacaagcaatcgcagcaagcaacatacctttatcgcccttgtgtgtcaacaatcgccagccctatctttggggcagtcattggtacaaaccatcaaggcacaacagctgcagcaactcgtgct

SEQ ID NO: 31892 - DNA, 391 bp, Zea mays
  Clone ID: LIB3182-009-P2-M1-D6
ccaacaagcaacatagaaagtggaatccagtagcaacaatagagcaacaatggcgaccaagatattttccctccttatgctccttgctctttctgcatgtgttgctaacgcgacaattttccctcaatgctcacaagctcctatagcttcccttcttcccccataccttccatcaatgatagcttcagtatgtgaaaacccagctcttcaaccctataggctccaacaagcaatcgcagcaagcaacatacctttatcacccttgtttcaacaatcgccagccctatctttggtgcagtcattggtacaaaccatcatggcacagcagctgcagcaaactcgtgctacctgtgatcaaccaagtagctctgggaaacctttctccctactc

SEQ ID NO: 31893 - DNA, 171 bp, Zea mays
  Clone ID: LIB3182-009-P2-M1-D9
cgcacatatctactatactatactctaggaagcaaggacaccaccgccatggcagtcaagatgcttgcattgttcgctctcctagctctttgtgcaagcgccactagtgcgacccatatttcagggcacttgccaccagtcatgcctttgtctaccatgaacccatgcatg

SEQ ID NO: 31894 - DNA, 67 bp, Zea mays
  Clone ID: LIB3182-009-P2-M1-E1
cgaggctactaccatactgaaccgtacagttgtcagcctcataccgagccatacttatgcttgtgtc

SEQ ID NO: 31895 - DNA, 174 bp, Zea mays
  Clone ID: LIB3182-009-P2-M1-E10
gtgcagcccgacggctacaccctgactgatcgcctcagcgccagtgggcggggcagcagcgttgccagcatgtcacgcagggggagccgcagcaccggtaccaggcgatcttcgggttggccctccactccatcctgtagcaggagtcgcaaagcggtcaggtcgcggggctgt

SEQ ID NO: 31896 - DNA, 166 bp, Zea mays
  Clone ID: LIB3182-009-P2-M1-E11
gccgaagcgcgagctgagcaaggcggaggcggcgatggagcggctgcagcggatctttggctcctccggcatggggcagccgtcgacggactcgccgtttctcgactcctccgagcaggtctacatcttctcccttgcgcttctcaagatgctcaagcacttcatg

SEQ ID NO: 31897 - DNA, 292 bp, Zea mays
  Clone ID: LIB3182-009-P2-M1-E2
atccgatccagccgccaccaggagcagagtttttcgtcatctcttctacggcgaacaacccccagacgcccaccagatcacttggtaaactttgatgacgggtgatggcggcttctatcgctaacctgaacagcgtggcagtgcttaaaaagcttgaggagctcgttatgaatcgcaggtacatgactggctaccaagctgtcaacgatgacttggctgtctacacttaggtttcgattgttccctcgtccaacaatatcaacgaaggaaggtggtttaatgacattgatgc

SEQ ID NO: 31898 - DNA, 407 bp, Zea mays
  Clone ID: LIB3182-009-P2-M1-E4
aattagctcatcgactccagattggagaactcgacaccatgaaggtgctgatcgttgcccttgctctcctggcgctcgctgcgagcgccgactccagtacaagcggcggctgtggctgccagacaccaccgtttcatctaccgcctccgttctatatgccgcctccgttctatctgccgccgcagcagcagccgcagccatggcaataccccactcaaccaccgcagctaagcccgtgccagcagttcggatcctgcggcgtcggcagcgtcggcagcccgttcctgggccagtgcgtcgagttcctgaggcaccagtgcagcccggcggcgacgccctacggctcgccacagtgccaggcgctgcagcagcagtgctgccaccagatcaggcaggtggagccgctg

SEQ ID NO: 31899 - DNA, 411 bp, Zea mays
  Clone ID: LIB3182-009-P2-M1-E6
gcaacatagaaagcacaatagtgtaccaacaatggcagccaaaatattttgcctccttatgctccttggtctttctgcaagtgctgctacggcgaccattttcccacaatgctcacaagctcctatagcttcccttcttcccccgtacctctcaccagcggtgtcttcggtatgtgaaaacccaattcttcaaccctataggatccaacaggcaatcgcagctggcatcttacctttatcacccttgttcctccaacaatcatcagccctattacagcagttacctttggtgcatttattggcacaaaacatcagggcacaacaactacaacaacttgtgctagcaaaccttgctgcctactctcagcaacaacagtttcttccattcaaccaactagctgcattgaactc

SEQ ID NO: 31900 - DNA, 312 bp, Zea mays
  Clone ID: LIB3182-009-P2-M1-E8
attttcagcattcagaaacacaccaagcgaagcgcactagcaacaacctaacaacaatggctaccaagatattagccctccttgcgcttcttgcccttttagtgagcgcaacaaatgcgttcattattccacagtgctcacttgctcctagtgccattattccacagttcctcccaccagttacttcaatgggcttcgaacatccagccgtgcaagcctacaggctacaactagcgcttgcggcgagcgtcttacaacaaccaattgcccaattgcaacaacaatccttggcacatctaaacctacaaacca

SEQ ID NO: 31901 - DNA, 350 bp, Zea mays
  Clone ID: LIB3182-009-P2-M1-E9
attttcagcattcagaaacacaccaagcgaagcgcactagcaacaacctaacaacaatggctaccaagatattagcccttcttgcgcttcttgcccttttagcgagcgcaacaaatgcgttcattattccacagtgctcacttgctcctagtgccattattccacagtttctcccaccagttacttcaatgggcttcgaacattcagccgtgcaagcctacaggttacaactagcgcttgcggcgagcgttttacaacaaccaattgcccaattgcaacaacaattcttggcacatttaaacctacaaaccattgcaaccgaacagttacaaccagttttttggcattac

SEQ ID NO: 31902 - DNA, 328 bp, Zea mays
  Clone ID: LIB3182-009-P2-M1-F1
gtaataccagagatcgaacaacttggtcctgcagctcaagaagagagttttgtgcatttgggggccgggggcaagagagagagagagagagccatggcggcggaccagcaaccgcagctgcaggaggagatgaacgacgctgacggcggaggcctcaggctgcctccagggttccgcttccacccgagcgacttcgagattggcagcttctacctcaccaacaaggtgctcaacacgcgcttcacctgcaccgccattacggaggccgacctaaacaagattgagccatgggaccttccgagcaaggcgaagatgggcgagaaagagt

SEQ ID NO: 31903 - DNA, 263 bp, Zea mays
  Clone ID: LIB3182-009-P2-M1-F10
cagccagctacaggctacagccgtggcgaaagcacacacggatcaatcacactcactcgcggcccggccattctcctgctcgtgcgtgctctgcccttttcaggcgatcgaccaaccaacttctcgtcactgccatggctctgctctccgacctcatcaacctcgacctctcgggccgcaccgggaagatcatcgccgagtacatctgggttggcggttccgggatggacctcaggagctaagtcaggacgctttcctgaccc

SEQ ID NO: 31904 - DNA, 407 bp, Zea mays
  Clone ID: LIB3182-009-P2-M1-F11
catttattggcacaaaacatcagggcacaacaactacaacaacttgtgctagcaacctgctgcctacccccagcaatttcttccattcaaccaactagcagcattgaactctcctgcttatttacagcagcaacaactactaccattcagccagctagctggtgtgagccctgctaccttcttgacacaaccacagttgttgccgttctaccagcacgttgcgcctaacgctggcaccctcttacaactgcaacaattgctgccattcaaccaacttgctttgacaaacccagcagtgttctaccaacaacccatcattggtggcgccctcttttagatttcttatgagttatagttcaataataaagttttttatctgatgtttgcggcttcccagaaataagaaa

SEQ ID NO: 31905 - DNA, 370 bp, Zea mays
  Clone ID: LIB3182-009-P2-M1-F12
ctgggtcttcagaccattagctttatctactccagagcgcagaagaacccgatcgacaccatgagggtgttgctcgttgccctcgctctcctggctctcgctgcgagcgccacctgcacgcatacaagcggcggctgcggctgccagccaccgccggcggttcatctaccgccgccggtgcatgtgccacctccggttcacctgccacctccggggcatgtcccaccgccggtccacctgccgacgccggtccacctgccaccgccggtccatgtgccgtcgccgggtcatctgccgccgtcaccatgccactaccctacttaaccgccccgggcttagccttatccccagccacacccatgcccgtgcc

SEQ ID NO: 31906 - DNA, 378 bp, Zea mays
  Clone ID: LIB3182-009-P2-M1-F2
gagcattcagaaacacaccaagcgaagcgcactagcaacaacctaacaacaatggctaccaagatattatccctccttgcgcttcttgcgctttttgcgagcgcaacaaatgcgtccattattccacaatgctcacttgctcctagttccattattccacagttcctcccaccagttacttcaatggccttcgaacacccagctgtgcaagcctataggctacaacaagcgattgcggcgagcgtcttacaacaaccaattgcccaattgcaacaacaatccttggcacatgtaacaatacaaaccatcgcaacgcaacagcaacaacagtttctaccagcactgagccacctagccatggtgaaccctgtcgcctac

SEQ ID NO: 31907 - DNA, 199 bp, Zea mays
  unsure at all n locations
  Clone ID: LIB3182-009-P2-M1-F4
cgatcgaaatcgaaccgcctccctgcgtgctcccctgatcaagaaattctcacgccgcgcgaacgcacgcctgaggcggttggatcctctggtggggttccttggtctcgatttgctgngtgtggatgggggcgccccatcaacgttggactcccgaggaagaggccgctctctatgttggtttcgacaaacactggcc

SEQ ID NO: 31908 - DNA, 312 bp, Zea mays
  Clone ID: LIB3182-009-P2-M1-F5
gcgacgtcctggagcgcggcttcaccctcaacctcgtcggcaacaggctcttctacgccggggtgcccctcctgctctggatcttcggcccgctcctcgccttcctgtcctccatggtcatggtccccatactctacagcctcgacgtcgtcaacctcatgggccacagcggatgcgtcgtcgtcagcggcaaatctgcggagatgaacggcgggagcgagtgcgcgcgtgccgtctgaagctgccggacttgtgtcctcaacaaaccatatgcatgcgatccgtacatgtgattcggttgagactgttgcc

SEQ ID NO: 31909 - DNA, 159 bp, Zea mays
  Clone ID: LIB3182-009-P2-M1-F7
cagaccattagctttatctactccagagcgcagaagaacccgatcgactccatgagggtggtgctcgttgccctcgctctcctggctctcgctgcgagcgccatcttcacgcatacaagcggtggctgctgttgttcatcacctctccttgttcatctt

SEQ ID NO: 31910 - DNA, 366 bp, Zea mays
  Clone ID: LIB3182-009-P2-M1-F8
cgccctcccccctccggcgaaaaccgattcccttccccgattccctccggcgtttcctggtcccttagtgcaagcaaggacaccgctcctctagcgagctctgttctgaagcggcaagaaagatgattaatcttttcaaaataaagggtcaaaagaaagaagaggcagcaagtgctgctggaaaggcccctgttaagaaacagtctgctggggagctccgtcttcataaagatattagtgagctcaacctgccgaagaccacatcaatttgttttcccaatggcaaggatgatctgatgaaatttgagaacaccatccgacctgatgaaggatattacatgggcgggactttcgttttcacctttc

SEQ ID NO: 31911 - DNA, 359 bp, Zea mays
  Clone ID: LIB3182-009-P2-M1-G1
ctaactataaacatagaacgtacaatattagaccaataatggtagccaaaatattatgccacattatgctctttggtctttctgaactaactgctatggacatgcattttaccgcactgctcacaggctgctatagctttccttgttccccaatacctttgaccagcaatgcatttacgttgtgaaagatcaattcttataccctacaagagtccacagggaatttcagaaggcatgttacctttataaaccttaggcctcccacaatgatgcgtcctattacacgagttacctttggtgcatttattggcacaaaacattagggtacaacatctacaacaactcgtgctatgaaacct

SEQ ID NO: 31912 - DNA, 277 bp, Zea mays
  Clone ID: LIB3182-009-P2-M1-G10
gcaagagcaagcaagagaggacgacatggcggcgccacggagcctggcggaccgcgctctcgctgctcgtcttcgccaccctcgcgctcctcgacgccgacaccgtcgcctgcctctacccggtgctggagctcgccgagcccaccatgatggccgtgctgccgcccgtcgtcggcgccgtcgcgggctacttattcatggagttccccaacaaccggcacggtgtcgggtaccagcccacgcccgacaccttggacttgcagtacaaatactagcc

SEQ ID NO: 31913 - DNA, 168 bp, Zea mays
  Clone ID: LIB3182-009-P2-M1-G2
gatcgatcgccacagccaacaccacccgccgaggcgacgcgactgccgccaggaggaaggaataaactcactgccagccagtgaagggggagaagtgtactgcttagttgactagtgcacgcacacaccctgacgcgtgctcatttcgtggacatccagtgggtttat

SEQ ID NO: 31914 - DNA, 151 bp, Zea mays; identical to SEQ ID NO: 31748
  Clone ID: LIB3182-009-P2-M1-G3

SEQ ID NO: 31915 - DNA, 396 bp, Zea mays
  Clone ID: LIB3182-009-P2-M1-G4
gagaggcccaactgccgaagccatcgatcgccggcacctcttcgagcagaatagttgagaatggctgacgaggatatccagcctatcgtatgtgacaatggcactggaatggtcaaggccggtttcgctggtgatgatgcgccaagagctgtcttccccagcattgtgggaagaccacgccacaccggtgtcatggtcggcatgggccaaaaggatgcctacgtaggtgatgaggctcaagccaagagaggcatcctgacactgaagtacccgattgagcatggcattgtcaacaactgggatgacatggagaaaatttggcatcacaccttgtacaacgagcttcgtgtttcgactgaagatcaccctgggctgttgaccgaggtcccttttaac

SEQ ID NO: 31916 - DNA, 414 bp, Zea mays
  Clone ID: LIB3182-009-P2-M1-G6
caacaagcaacatagaaagtggaatacagtagcaacaatagagcaacaatggcggccaagatattttccatccttatgctccttgctctttctgcatgtgttgctaacgcgaccatttttcctcaatactcacaagctcctatagctgcccttcttcccccataccttccatcaatgaccgcttcagtatgtgaaaacccagcccttcaaccctacaggctccaacaagcaatcgcaacaagcaacttacctttatcacccctgttctttcaacaatcgccagccctatctttggtgcagtcattggtacaaaccatcagggcacaacagctgcagcaactcgtgctaccagtgatcagccaagtagctctggcaaacctttctccctactctcagcaacaacaatttcttcca

SEQ ID NO: 31917 - DNA, 322 bp, Zea mays
  Clone ID: LIB3182-009-P2-M1-G7
cagccctagcatgtcagcagcagctgtcaacatatatattcctcagactcaaagctttggactgggcagtgtgctaccaccatctttacataatcaagtttccacaggaattattgatgagagtagcagcagtgtcaattttggtgatagtgctattggattcatgaaaaggaaaaatgcagtagttgctggaagccataatttttttcatggatttgctgggtcacagtcatctgtccatgagccttacaattctgcgcatggggcatggaatcctgcatgtcaatcaaattgggcacccaattttgcaactttaaaacct

SEQ ID NO: 31918 - DNA, 286 bp, Zea mays
  Clone ID: LIB3182-009-P2-M1-G8
caactgactctgtcgaactctgctgcgtacctacaacagcgacaacagttacttaatccattggtagtggctaacccattggtcgccgccttcctacagcagcaacaattgctgccatacaaccagttctctttgatgaatcctgtcttgtcgaggcagcaacccatcgatggaggtgccatcttttagattacatatgagatgtactcgataatggggccctcataccgacgtgtgttttctagaaataatcaatatattgattgagatttatctcggtatattt

SEQ ID NO: 31919 - DNA, 269 bp, Zea mays
  Clone ID: LIB3182-009-P2-M1-G9
attttgagcattcagaaacacaccaagcgaagcacattagcaacaacctaacaacaatggctaccaagatattatccctccttgcgcttcttgcgctttttgcgagcgcaacaaatgcgttcattattccacaatgctcacttgctccaagttccattattacacagtttcctcccaccagttacttcaatgggcttcgaacacccagctgggcaaggctatatgccacatcaagcaattgaggtgatgcgcctacaatcaccaatttt

SEQ ID NO: 31920 - DNA, 275 bp, Zea mays
  Clone ID: LIB3182-009-P2-M1-H1
aagagagaagccgataaactgtgtttcacgtcccggcgatgagcccccgtgtggtcctcctcttcctcgccgacctccgcccctgcgccgccctcgtccgccttcactccaccactttttccttcactttccttgacgccccaacgcgctttggcccccgagtgagcggcgatgggatctgcggctccctgcgtgccgctgacccggccgaggcgtgtgagaccattaaagaccgcggcgggcgccgcggtgcgggcaggaaagcttttgtgctg

SEQ ID NO: 31921 - DNA, 190 bp, Zea mays
  unsure at all n locations
  Clone ID: LIB3182-009-P2-M1-H11
acccacgcgttcgacatcaagaaacatanaaagtgggatacagtttcaacaatcgagcaacaatggcggacaaaatattttccatccttatgctttttggtctttatggagggggtgataacacgaccattttttctaaatactcacatgttcctattgctgttttttataccatataccttccattaat

SEQ ID NO: 31922 - DNA, 281 bp, Zea mays
  Clone ID: LIB3182-009-P2-M1-H2
aaacacatgcatgcgaatttatttctattctataacttaacctacattctaatctctagtcggacgcttacaacctactgtttaaaaacaggccatactgaattaaattaatacgcttggaaaaaagatctcatcatgactggtgtcgtaggatcgaacatacacacatcgaattcatattagaaacaatttcgcatactggatggcgaatgtgacacaccctttgccgaaacattaaatccagctttagtagaggttaatctaaaaactattatcttttt

SEQ ID NO: 31923 - DNA, 293 bp, Zea mays
  Clone ID: LIB3182-009-P2-M1-H3
catctgcgtacacggtctccctcttcctgtcagtagtagagtgagagtgaggcagcgagtgggagacaaggggaaatggggaagggagcgcaagggagcgatgcggcggcggcgggcggcgaggtggaggagaacatggcggcgtggctggttgccaagaacacccttaagatcatgcccttcaagctcccgcccgtcggcccttatgatgtccgcgtgcgcatgaaggcagtggggattttgcggtagcgatgtgcactacctaagggagatgcgcattgcgcactttctgg

SEQ ID NO: 31924 - DNA, 403 bp, Zea mays
  Clone ID: LIB3182-009-P2-M1-H5
attttcaacattcagaaacacaccaagcgaagcgcactagcaacaacctaacaacaatggctaccaagatattagccctccttgcgcttcttgcccttttagcgagcgcaacaaatgcgttcattattccacagtgctcacttgctcctagtgccattattgcacagattctcccaccagttacttcaatgggcttcgaacatgcagccgtgcaagcctacaggctacaactagcgcttgcggagagcgtattacaacaaccaattgcccaattgcaacaacaatccttgggacatgtaaacctacaaaccatcgcaacgcaacagcaacaacagtttctgccatcactgagccacctagccgggtgaaccctgtcgcctacttgcaacagcagctacttgca

SEQ ID NO: 31925 - DNA, 319 bp, Zea mays
  Clone ID: LIB3182-009-P2-M1-H6
acacgcttacatccaacgctataaatattttatacgttcatgtacttctagtcctttgagcgagcgcaacacaacgcgttcattattgcacaccgctcacttgctcatattgacattattgcacaacatctcccactagttacttgaatggacttcgaacatgcaggcatgcaaggctacaggctacaactagcgcttgtggatggcgtattacaacaaccatattgccaattgctaaaacaattgcttggcacatgtaaacctacaaaccattcgaaacgcaacaacaacaacagtttctgccattactgaaccacct

SEQ ID NO: 31926 - DNA, 145 bp, Zea mays
  Clone ID: LIB3182-009-P2-M1-H7
acgaagagagaagcccataaactgtgtttgacgtactggctaatattccccgtgtggaactaatatacctttcattccttcaaacctgcaccaaactattatagccttaactacaccaactttttccttcacttttcttgacgcc

SEQ ID NO: 31927 - DNA, 382 bp, Zea mays
  Clone ID: LIB3182-009-P2-M1-H9
cagaaacacaccaagcgaagcgcactagcaacgacctaacaacaatggctaccaagatattagccctccttgcgcttcttgccctttttgtgagcgcaacaaatgcgttcattattccacaatgctcacttgctcctagtgccattattccacagttcctcccaccagttacttcaatgggcttcgaacacctagctgtgcaagccaacatgcaacaacaagcgcttgcggcgagcgtcttacaacaaccaattgcccaattgcaacaacaatccttgccacatgtaacaatacaagccatcacaacgcaacagcaacaacagttcctaccagcactgagccacctagccatggtgaaccctgccgcctacttgcaagagca

SEQ ID NO: 31928 - DNA, 377 bp, Zea mays
  Clone ID: LIB3182-010-P2-M1-A1
cttataagcaggatgagtgggtggtatgtcgtgtgttccacaagaccactgggatcaagaagaccaccactgctgcaccggcgtaccaggtggccatggccggcgctgagatggatcagaatcagaacaacatccccttccccatgccgatgcaattttccatgctgcccgacttctccttggacccggtgcccccctactacccgtaccccaacgctggcgcggggatgccgatgcttcctatggcagcaggtataggtggtggcgccggtgggctccacctcaacggcgcccgcctgttcggtaatccgatggccgcgccccagcccatgagcttttaccaccagatgggcacggggactgcttgcgctggcggt

SEQ ID NO: 31929 - DNA, 410 bp, Zea mays
  Clone ID: LIB3182-010-P2-M1-A12
cgtcacgcccccaacacccccacaacccgaagcagcgaaagctcccctaaccctctccgcgcatccgatcgcaaggaagaagagggagatgagctactacgggcagcagccccccgtcggcgtcccgccgcagcaaggctacccgggcaaggacggctacccgccagcggggtacccgccggccggcgcagggctaccctccgcagggctacccgccgcagtacgcgcagccgccgcctccacagcagcagcagagcagcgggccttccttcatggagggatgcttggctgccctctgctgctgctgcctcctggacgcctgcttctgagagtgagaggggccgaccgacggattcgacacggcgacaagtgaaactactagctttctatgcgagggagagagagagaga

SEQ ID NO: 31930 - DNA, 238 bp, Zea mays
  Clone ID: LIB3182-010-P2-M1-A2
atcgtaggaatggccttacgatccgatgcaattgaatctgccacgcgctcattatcatgggaggaggatatgagctcaccttcgcctttacttgattcgacaaacttaacccccatctcaagcgtggatgacgatgaacttgaatgcgtttcctttgtgcaaaagattgtatcatttgcttttggcctaggcgacctgcggttggatctggacttcacaggctggtacttgcctgact

SEQ ID NO: 31931 - DNA, 148 bp, Zea mays
  Clone ID: LIB3182-010-P2-M1-A3
gtgtcctttcaggagcacgaacacactgtagaacgcagtgtggatcaggaagcataaacttcactgtacatgtttgatgcttgtaatattaactcatataataatcatattcttgtcagatttttatcttataactaataatattaac

SEQ ID NO: 31932 - DNA, 341 bp, Zea mays
  unsure at all n locations
  Clone ID: LIB3182-010-P2-M1-A4
gaaagaagaaaagagagaagcccggaaagcgaagaaagagctcaaaggcctgtataaatcagaaacgcagaaggctcagaaagttgctgctgttactggaccttcttccattcgactaatgtgatggttgatctgtggcacgtttactgatgagtgacgactatgacagtcttgaatccaaaagaccgcctggagccctggacaaatgcatcaaatctatgaacgatgtatgataccagntcatatttgtgttattctcaaggattttgtcgacaggatacccaacgcttgcttttactatatattagttagttgaaagggaagataattatacgcacttt

SEQ ID NO: 31933 - DNA, 405 bp, Zea mays
  unsure at all n locations
  Clone ID: LIB3182-010-P2-M1-A5
cgaccattttcccgcaatgctcgcaagttcttatagcttcccttcttcccccgtacctctcaccagcggtgtcttctgtatgtgaaaacccaatttttcaaccctacaggatccaacaggcaatcgcagctggcatcttacctttatcacccttgttcctccaacaatcatcagccctattacaacagttacctttggtgcatttattggcacaaaacattagggcacaacaactacaacaacttgtgctagcaaaccttgctgcctactctcagcaacagcagtttctttcattcaaccaactaggntcattgaactctgctttttatttgaacaacaacaactaccattcagccagctacctgctgtctacccccagcaatttcttccattcaaccaactagc

SEQ ID NO: 31934 - DNA, 408 bp, Zea mays
  Clone ID: LIB3182-010-P2-M1-A7
gagaccaacaagcaacatagaaagtggaatccagtagcaacaatagagcaacaatggcgaccaagatattttccctccttatgctccttgctctttctgcatgtgttgctaacgcgacaattttccctcaatgctcacaagctcctatagcttcccttcttcccccataccttccatcaatgatagcttcagtatgtgaaaacccagctcttcaaccctataggctccaacaagcaatcgcagcaagcaacatacctttatcacccttgtttcaacaatcgccagccctatctttggggcagtcattggtacaaaccattagggcacagcagctgcagcaacttgtgctacctgtgatcaaccaagtagctctggcaaaccttttttcctactcttaggaacaacaat

SEQ ID NO: 31935 - DNA, 191 bp, Zea mays
  Clone ID: LIB3182-010-P2-M1-B10
gaaaccttgcgaaactgtcggagggtgagtacaagaacttttcggcttctgaatttcggcaaacgttccggagctctgctggcgttgggattattttgcctaccaaacttttccgggtggaggtgaactattgtcgcatcctaaagcaagctgagcatgacagcgcgaagactggaatccagttcagcttt

SEQ ID NO: 31936 - DNA, 407 bp, Zea mays
  Clone ID: LIB3182-010-P2-M1-B11
attgataccaactagcaacatacatagtgaagtacactagcaatatcttagcaccaatgggagccaagatttttgccctccttgccctccttgctctttcagcaagcgctgctacctcgacttttattccacaatgctcacaacaatacctctctccggcgacagccgtgggatttcaatacccaactatacaatcctacatggtacaagaggccatccaagcaagcatcttacggtcattagcattaaccctccaacaaccatatgctctattgcaacagccatccttagtgcatctgtatctccaaagaatcgcggcacaacaactacaacaacagttgctaccaacaatcaatcaagtagttgcagcgaaccttgctgcttacctccagcaacaacagtttctt

SEQ ID NO: 31937 - DNA, 188 bp, Zea mays
  Clone ID: LIB3182-010-P2-M1-B12
accgtgtccatcaggaaacatatatagtataacagcggactgatagtgggatctgagcaatagagcttaggtatgcgagcgagccgtaaggaaatgtaatcgtcggcaaggcagcttgtattgaatagtggaggtggaaacaagaatgccttcaaagcacttattgctacaaaatacagtgggatcaa

SEQ ID NO: 31938 - DNA, 168 bp, Zea mays
  Clone ID: LIB3182-010-P2-M1-B3
ctcaacatatgagaaccacactccttgaatcgaagtgagtacaacttaacaacatgtgctaccaagatatacttcctccatgctctttttgtccttttagctagctcatcacattctaacatgatttcatagtgcttactagctcctagtgccattatttcacagttc

SEQ ID NO: 31939 - DNA, 371 bp, Zea mays
  Clone ID: LIB3182-010-P2-M1-B4
gccgcatccaagcccgtgccagctgcagggaacctgcggcgttggcagcaccccgatcctgggccagtgcgtcgagtttctgaggcatcagtgcagcccgacggcgacgccctactgctcgcctcagtgccagtcgttgcggcagcagtgttgccagcagctcaggcaggtggagccgcagcaccggtaccaggcgatcttcggcttggtcctccagtccatcctgcagcagcagccgcaaagcggccaggtcgcggggctgttggcggcgcatatagcgcagcaactgacggcgatgtgcggcctgcagcaaccgacttcatgcccctacgctgttgccgggggtgttccccactgaagaaactatgtgc

SEQ ID NO: 31940 - DNA, 394 bp, Zea mays
  unsure at all n locations
  Clone ID: LIB3182-010-P2-M1-B5
attttgagcattcagaaacacaccaagcgaagcacattagcaacaacctaacaacaatggctaccaagatattatccctccttgcgcttcttgcgctttttgcgagcgcaacaaatgcgttcattattccacaatgctcacttgctccaagttccattattacacagttcctcccaccagttacttcaatgggcttcgaacacccagctgtgcaagcctataggctacaacaagcaattgcggcgagcgtcttacaacaaccaattttccagttgcaacaacaatccttggcacatctaacaatacaaaccatcgcaacgcaacagcaacaacaattcctaccagcactgagccacctagccatggtgaaccctgccgnctacttgcaacagca

SEQ ID NO: 31941 - DNA, 249 bp, Zea mays
  Clone ID: LIB3182-010-P2-M1-B7
gaacaattgaaatgaaaagaaaaaagtattgttcattcaggtcattgcttacactttcactttttctttatattttattcttttactattatttctctaatctatttgtcttttaatttcttttcttgcttttttttctttatttcttattcttatttactttctttttcatttttttcttttttcttttttattttctttttcctttcttttttccttcttcttttatcttcttttcttttttccttt

SEQ ID NO: 31942 - DNA, 145 bp, Zea mays
  Clone ID: LIB3182-010-P2-M1-B8
attctggtcagtttgaaggtgctataagattcagagttgatgacttgcaaaagcctattgataaacctgagaacataaactggggaagttatgcaaaaggtgctgatagtgcactgcagaatagtggatatgatctaaggatggg

SEQ ID NO: 31943 - DNA, 358 bp, Zea mays
  Clone ID: LIB3182-010-P2-M1-B9
tgcatttattggcacaaaacatcagggcgcaacaactacaacaacttgtgctagcaaaccttgctgcctactctcagcaacagcagtttcttccattcaaccaactagctgcattgaactctgcttcttatttgcaacaacaacaactaccattcagccagctatctgctgcctacccccagcaatttcttccattcaaccaactgacagcattgaactctcctgcttatttacagcagcaacaactactaccattcagccagctagctggtgtgagccctgctacctttttgacacaaccaacagtggtgccgttctaacagcacgctgcgcctaaacgttggaccctcttacaact

SEQ ID NO: 31944 - DNA, 303 bp, Zea mays
  Clone ID: LIB3182-010-P2-M1-C10
gttaaccaatcacaaagatggagtttgagtttgaaaggagacgagcgacaaaagaagacattaaggagctgatattccgtgagatattggaatatcattcacaactgcttaaagactatatcaatggcacggagaggacaacctttctgtacccaagtgctgtcgaacaatttaggaagcaaattgctcatcttgaagaaaatagtggtaacggacctgttattccaaaggaaagaaaacatacttgtttttctaggtctacttttgattactcatttacaaattcttgttaaggaacaaccc

SEQ ID NO: 31945 - DNA, 413 bp, Zea mays
  Clone ID: LIB3182-010-P2-M1-C2
accttccatcaattatagcttcagtatgtgaaaacccagctcttcaaccatataggcttcaacaagcaatcgcagcaagcaacatacctttatcgcccttgttgtgtcaacaatcgccagccctatctttggtgcagtcattggtacaaaccatcagggcacaacagctgcagcaactcgtgctacctgtgatcaaccaagtagctctggcaaacctttctccctactcttcgcaacaacaatttcttccattcaaccaactgtctacactgaaccctgctgcttatttgcagcaacaactattaccatttagccagctagctactgcctactcttaacaacaacaacttctttcatttaaccaaatggccgcactgaacctcgctgcttatttgcagcagcaaatactacta

SEQ ID NO: 31946 - DNA, 379 bp, Zea mays
  Clone ID: LIB3182-010-P2-M1-C3
cagaaacacaccaagcgaagcgcactagcaacgacctaacaacaatggctaccaagatattagccctccttgcgcttcttgccctttttgtgagcgcaacaaatgcgttcattattccacaatgctcacttgctcctagtgccattattccacagttcctcccaccagttactttaatgggcttcgaacacctagctgtgcaagccaacatgcaacaacaagcgcttgcggcgagcgtcttacaacaaccaattgcccaattgcaacaacaatacttgccacatctaacaatacaagccatcacaacgcaacagcaacaacatgttctaccagcactgagtcacctagccatggtgaaccctgccgtctactttgcaag

SEQ ID NO: 31947 - DNA, 328 bp, Zea mays
  Clone ID: LIB3182-010-P2-M1-C4
caaggtttggtgacagggatgggtaccgtggtggtcctcgtggtgctcctggtgactttggtggcgataagagtggagctcctgctgagttccagccatcattcaggaggcctggctttgggcgtggtggcggcagcggcttcggcgcgggcccaacctcttcttccatggagtgaagttgcccttggtttggacatggtgtttcccttcgcatgtggcctttagttttgaaggacagttattatgtactagtaatattactcggatcggccagtgctgacatatgcaaaaaaatgttctgtcgttatacattggttccagtattatt

SEQ ID NO: 31948 - DNA, 72 bp, Zea mays
  Clone ID: LIB3182-010-P2-M1-C6
atgcgacttcatagctcttatatagttgttcctatattcaattcactggtcgttgctttacaactggcagca

SEQ ID NO: 31949 - DNA, 226 bp, Zea mays
  Clone ID: LIB3182-010-P2-M1-C7
gcgcagaagaacccgatcgacaccatgagggtgttgctcgttgccctcgctctcctggctctcgctgcaagcgccaccttcactcatacaagcggttgctgctgttgtccaccacctacttctgttcatcttcctactcctttctatctccttccctcccttttaccttcacacattatttatcttttatccatctactatactttataatcctcccttttcatac

SEQ ID NO: 31950 - DNA, 408 bp, Zea mays
  Clone ID: LIB3182-010-P2-M1-D1
agcattcagaaacacaccaagcgaagcacattagcaacaacctaacaacaatggctaccaagatattatccctccttgcgcttcttgcgctttttgcgagcgcaacaaatgcgttcattattccacaatgctcacttgctccaagttccattattacacagttcctcccaccagttacttcaatgggcttcgaacacccagctgtgcaagcctataggctacaacaagcaattgcggcgagcgtcttacaacaaccaattttccagttgcaacaacaatccttggcacatctaacaatacaaaccatcgtaacgcaacagcaacaacaatttctaccagcactgagccacctagccatggtgaaccctgccggctacttgcaacagcagttgcttgcatcaaacccac

SEQ ID NO: 31951 - DNA, 336 bp, Zea mays
  Clone ID: LIB3182-010-P2-M1-D10
gcggccgccctttttttttttttttttttagaaatgtactttcttatttctgggaagccacaaacatcatccaaaaaacttcattattgaactataactcataagcaatctaaaagagggcaccaccaatgatgggttgttggtagaacgctgttgggtttgtcaaagcaagttggttgaatggcagcaattgttgcagttgtaagagggtgccagcgttaggcgcagcgtgcaggtagaacggcaacaactgttgttgtgtcaagaaggcaacagggctcacattaactagctggctgaatggtggtagcctgtgctgttgtaaataagcagcag

SEQ ID NO: 31952 - DNA, 175 bp, Zea mays
  Clone ID: LIB3182-010-P2-M1-D11
tgccctttgtccaacttgctttgacaaacccagcagccttctaccaacaacacatcattggtggtgccctcttttagattgcttattagtcgtatttcaataataaagtctattggatgttgtatgtgtgccaaccagaattttatgtatgtacattcatcatatttttatgttt

SEQ ID NO: 31953 - DNA, 379 bp, Zea mays
  unsure at all n locations
  Clone ID: LIB3182-010-P2-M1-D12
aactagcaacatagaaagcacaatagtgtaccaacaatggcagccaaaatattttgcctccttatgctccttggtctttctgcaagtgctgctacggcgaccattttcccgcaatgctcgcaagctcctatagcttcccttcttcccccgtacctctcaccagcggtgtcttcggtatgtgaaaacccaattcttcaaccctacaggatccaacaggcaatcgcagctggcatcttacctttatcacccttgttcctccaacaatcatcagccctattacaacagttacctttggtgcatttattggcacaaaacatcagggcacaacaactacaacaacttgtgctagcaaaccttgctgnctactctcagcaacagc

SEQ ID NO: 31954 - DNA, 340 bp, Zea mays
  unsure at all n locations
  Clone ID: LIB3182-010-P2-M1-D4
gaccaacaagcaacatagaaagtggaatccagtagcaacaatagagcaacaatggcgaccaagatattttccctccttatgctccttgctctttctgcatgtgttgctaacgcgacaattttccctcaatgctcacaagctcctatagcttcccttcttcccccataccttccatcaatgatagcttcagtatgtgaaaacccagctcttcaaccctataggctccaacaagcaatcgcagcaagcaacatacctttatcacccttgtttcaacaatcgccagccctaattttggtgcagtcattggtacaaaccattanggcacagcagctgcagcaac

SEQ ID NO: 31955 - DNA, 396 bp, Zea mays
  Clone ID: LIB3182-010-P2-M1-D6
cggacgcgtgggctagcaacatagaaagcacaatagtgtaccaacaatggcagccaaaatattttgcttccttatgctccttggtctttctgcaagtgttgctaccgcaaccatttttccacaatgctcacaagctcctatagcttcccttcttcccccatacctctcaccagcggtgtcttcaatgtgtgaaaacccaattgttcaaccctacaggatccaacaggcaattgcaacatgcatcttaccattatcaccccttgtttcttcaacaaccgtcagccctattacagcagttacctttgtgtcatttggtggcacaaaacaatagggtacaacaactaccacaacttgtgctagtaaaccttgttgtatactctcacgaacatcagtttt

SEQ ID NO: 31956 - DNA, 407 bp, Zea mays
  Clone ID: LIB3182-010-P2-M1-D7
aaaatattttgcctccttatgctccttggtctttctgcaagtgctgctacggcgaccattttcccgcaatgctcgcaagctcctatagcttcccttcttcccccgtacctctcaccagcggtgtcttcggtatgtgaaaacccaattcttcaaccctacaggatccaacaggcaatcgcagctggcatcttacctttatcacccttgttcctccaacaatcatcagccctattacaacagttacctttggtgcatttattggcacaaaacattagggcacaacaactacaacaacttgtgctagcaaaccttgctgcctactctcagcaacagcagttttctccattcaaccaactaggttcattgaactctgcttcttatttgcaacaacaacaactaccattcag

SEQ ID NO: 31957 - DNA, 153 bp, Zea mays
  Clone ID: LIB3182-010-P2-M1-D8
attgagaccaactagcaacatagaaagcacaatagtgtaccaacaatggcagccaaaatattttgcttccttatgctccttggtctttctgcaagtgttgttaccgcaactatttttcccacaaggctcacaagctcctatagctttcctttt

SEQ ID NO: 31958 - DNA, 90 bp, Zea mays
  Clone ID: LIB3182-010-P2-M1-D9
tctattatgtgctgtcttctaatcgatggagggctcgctagatcagtgatgtaggttaccatattgattcaaatatgtgtatctattatc

SEQ ID NO: 31959 - DNA, 137 bp, Zea mays
  Clone ID: LIB3182-010-P2-M1-E1
aaactcaacagtgttctaccaacaacccatcattggtggtgccctcttttagattgcttatgagttatagttcaataatgaagttttttggatgatgtttgtggcgtcccagaaataagaaagtacatttctagatt

SEQ ID NO: 31960 - DNA, 395 bp, Zea mays
  Clone ID: LIB3182-010-P2-M1-E11
cggacgcgtgggtgcatctgtatctccaaagaatcgcggcacaacaactacaacaacagttgctaccaacaatcaatcaagtagctgcagcgaaccttgctgcttacctccagcaacaacagattcttccattcaatcaactagatggggtgaaccctgctatctacttgcaggcacaacagctactaccatttaaccaactagtcgggagcccttatgccttcttactgcaacaacagcttctaccattccatctgcaagctgtggcaaacattgctgatttcttgagacaacaacatttgttgccattctacccacaggttgtgggaaacattaatgccttcttgcaacaagaacaattgctaccattctacccacaaaatgtggcaaacatt

SEQ ID NO: 31961 - DNA, 386 bp, Zea mays
  Clone ID: LIB3182-010-P2-M1-E12
gaccattagctttatctactccagagcgcagaagaacccgatcgacaccatgagggtgttgctcgttgccctcgctctcctggctctcgctgcgagcgccacctccacgcatacaagcggcggctgcggctgccagccaccgccgccggttcatctaccgccgccggtgcatctgccacctccggttcacctgccacctccggtgcatctcccaccgccggtccacctgccgccgccggtccacctgccaccgccggtccatgtgccgccgccggttcatctgccgccgccaccatgccactaccctactcaaccgccccggcctcagcctcatccccagccacacccatgcccgtgccaacagccgcattcaagcccgtgccagc

SEQ ID NO: 31962 - DNA, 354 bp, Zea mays
  Clone ID: LIB3182-010-P2-M1-E2
gacggcgcgcgctggagggaggtcatggaggcctgcttcgcccgcgtggacggtgaggtcgccgtcgtcgagggcgaggtgaacaacgccggccacacggtgggctccaccgccgtcgtggccgtcgtggggccccgtcacatcgtggtcgcgaactgcggcgactcccgcgccgtgctctcccgcggcggcgtccccgtgccgctgtcttccgaccacaagccagataggcctgatgagttggaaagggtagaatcagcgggcggcagggtcatcaactggaaggggtaccgtgtcctgggggtgcttgcgacggcaaggtcaattggcgactactacatgaagccattcata

SEQ ID NO: 31963 - DNA, 338 bp, Zea mays
  Clone ID: LIB3182-010-P2-M1-E4
tattattgagaccaacaagcaacatagaaagtggaatccagtagcaacaatagagcaacaatggagaccaagatattttccctccttatgctccttgctctttctacatgcgttgctaacgcgacaattttccctcaatgctcacaagctcctatagcttccctttttcccccataccttccatcaattatagcttcagtatgtgaaaacccagctcttcaaccatataggcttcaacaagcaatcgcagcaagcaacatacctttatcgcccttgttgtgtcaacaatcggcagccctatctttgggcaggcattggacacaccatcagggcacaac

SEQ ID NO: 31964 - DNA, 313 bp, Zea mays
  Clone ID: LIB3182-010-P2-M1-E6
ctgtactgtgggaaggcgggacgaggatggcatgacagaacagaatgtagaagggcatggtcttctaggtgtgtgtggaagtgccagttgtgagaccctttttacaggggactcgctaccagtgatggcatttggaaccatggacccatgcatgcagcactgtatgaagcaacatgggcttgccaggttgatggcgtgtccgttcctgatgctggagcaactgttggacttaccgttttagacgatgccagtgatgatgccacagattgatgacgcctaacatgatggtaccattgatgaatccgagcattga

SEQ ID NO: 31965 - DNA, 408 bp, Zea mays
  Clone ID: LIB3182-010-P2-M1-E8
taccaactagcaacatacatagtgaagtacactagcaacatcttagcaccaatgggagccaagatttttgccctccttgccctccttgctctttcagcaagcgctgctacctcgacttttattccacaatgctcacaacaatacctctctccggcgacagccgtgggatttcaatacccaactatacaatcctacatggtacaagaggccatccaagcaagcattttacggtcattagcattaacccttcaacaaccatatgctttattgcaacagccatccttagtgcatctgtatctccaaagaatcgcggcacaacaactacaacaacagttgctaccaacaatcaatcaagttgttgcagcgaaccttgctgtttacctccagcaacaacagttactttcattc

SEQ ID NO: 31966 - DNA, 408 bp, Zea mays
  Clone ID: LIB3182-010-P2-M1-F1
cggacatcatcccagagatggagatctgtgacttcgacttcgagccctgtggctactccatgaatgctgttcatggccctgctttgtcgaccattcatgtgaccccagaggacggcttcagctatgcaagctacgaggtcatgggcttcaacccgggctctttctcttatggtgacctggttaagagggtgctgaggtgctttggtccaactgagttctctgttgccgtgaccatcttcggtgatcgggacaatgcgaagacctgggggacgaaactggatgctgaggcctatgcttgcagcaacatggttgagcaggtgctgccgtttggtggcttgctcatctatcagagcttcactgttacggccgaaacgacccatgggtcgccgaggtcagtcctgcatgact

SEQ ID NO: 31967 - DNA, 357 bp, Zea mays
  Clone ID: LIB3182-010-P2-M1-F10
gctgcgccggcgacgccgaggccatcgctgatcctcccacgtgcctcctcgcactcgcactcccaacccagcgccggcgggctcacctcttaccgcgtcaccgcctcccaccgccggcgcggcgatttcgttttcgtcgtcaaccccttgggcgccaatggccgcacgggaaagcagtggaagcagttgctgccgcttctccgcacccgcctcgctgaccagtgcaacatttgcgagtgcatcacttcgggcccatcccatgccatagatgtcacaagggaggctataaaggatggggttgatgccgtgatagcttgtggaggtgatggtacacttcatgaggtggtcatggtttct

SEQ ID NO: 31968 - DNA, 172 bp, Zea mays
  Clone ID: LIB3182-010-P2-M1-F11
atagccgctggctagctagctagttgagtcatttagcggcgatgattgagtaataatgtgtcacgcatcaccatgggtggcagtgtcagtgtgagcaatgacctgaatgaacaattgaaatgaaaagaaaaaagtattgttccaaattaaaaaattataatttaaataaaaa

SEQ ID NO: 31969 - DNA, 403 bp, Zea mays
  Clone ID: LIB3182-010-P2-M1-F12
ccgaccccctcccccacggcccgccttcccccgggagcacgagaccctcgttccctgcgccaccgactgagccaaggccgcgccttgccgtttccgacctaggtcgcgagatctcggaggagcggagccccgccgtgccgccacctgctacaggggggcacgcagggaccgcacggcgcgatggtggacacgggcggggggaggctctaccagcgccgtggcgcggtcgctttcgtcgcggccaacaaggcgctgctcgccgctgcgtgggtcgtcgggttcgcgctcgtgttcctatggcagagcgcctccatgtccttcggcaacgccggcggcggagggtacctcaggcttctgtcggtgccgtcttcgccgacgcgccccgcgccgcggatttccccac

SEQ ID NO: 31970 - DNA, 378 bp, Zea mays
  Clone ID: LIB3182-010-P2-M1-F2
agaaagtacaatagtgtaccaacaatggcagccaaaatattttgcctccttatgctccttggtctttctgcaagtgctgctactggtgaccattattcccacaatgctcacaagctcctatagctttccttattcccccgtacctcttaccagcggtgtcttctgtatgtgaaaacccaattttttaaccttatatgattcaataggcaatcacagctggcattttacctttatcactcttgttccttctacaatcatcagctccttatacaggactatacctttggggcatttattgtgacaaaacattatggcacaacaactacaacaacttgggctagcaaactttgctggctaccttcagaaacaacagttttt

SEQ ID NO: 31971 - DNA, 406 bp, Zea mays
  Clone ID: LIB3182-010-P2-M1-F3
ttcagaaacacaccaagcgaagcacattagcaacaacctaacaacaatggctaccaagatattatccctccttgcgcttcttgcgctttttgcgagcgcaacaaatgcgttcattattccacaatgctcacttgctccaagttccattattacacagttcctcccaccagttacttcaatgggcttcgaacacccagctgtgcaagcctataggctacaacaagcaattgcggcgagcgtcttacaacaaccaatttcccagttgcaacaacaatccttggcacatctaacaatacaaaccattgcaacgcaacagcaacaacaattcctaccagcactgagccacctagccatggtgaaccctgccgcctacttgcaacagcagttgcttgcatcaaacccactt

SEQ ID NO: 31972 - DNA, 398 bp, Zea mays
  Clone ID: LIB3182-010-P2-M1-F8
atcttacctttatcacccttgttcctccaacaatcatcagccctattacagcagttacctttggtgcatttattggcacaaaacatcagggcacaacaactacaacaacttgtgctagcaaaccttgctgcctactctcagcaacagcagtttcttccattcaaccaactagctgcattgaactctgcttcttatttgcaacaacaacaactaccattcagccagctacctgttgcctacccccagcaatttcttccattcaaccaactggcagcattgaactctcctgcttatttacagcagcaacaactactaccattcagccagctagctggtgtgagccctgctaccttcttgacacaaccacagttgttgccggtctaccagcacgctgcgcc

SEQ ID NO: 31973 - DNA, 393 bp, Zea mays
  Clone ID: LIB3182-010-P2-M1-F9
cccacgcgtccggcagtttcttccattcaaccaactagctgcattgaactctgcttcttatttgcaacaacaacaactaccattcagccagctacctgctgcctacccccagcaatttcttccattcaaccaactggcagcattgaactctcctgcttatttacagcagcaacaactactaccattcagccagctagctggtgtgagccctgctaccttcttgatacaaccacagttgttgccgttctaccagcacgctgcgcctaacgctggcaccctcttacaactgcaacaattggtgccattcaaccaacttgctttgacaaacccagcagggttctaccaacaacccaatattggtggggccctcttttagatttcttatgagttata

SEQ ID NO: 31974 - DNA, 352 bp, Zea mays
  Clone ID: LIB3182-010-P2-M1-G1
aaaaaaaaggaaaaggaaaaaaaacaaaaagaaataaaaacaaaaaaaaaaaaaagaggaagaaaaaaaaaaaaaaaaaaagaaagaaaaaaaaaaaaaaaaaaaaaaaaaaaaaaaaaaaaaaaaaaaaacaaaaaaaaaaaccaaaaaaaaaaaaaaaaaacaaaaaaagaaaaaaaaaaaagaaaaaaaaaaaaaaaaaaaaaaaaaaaaaaaaaaaaaaaaaaaaaaaaaaaagaaaaagaaaaaaaaaaaaaaaaaaaaacaaaaaaaaaaaaaaaaaaaaaaagagaaaaaaaaaaaaaaaaaaaaaaaaaaaaaaaaaaaaaaaaaaagaaaaaaaaaaaaagaa

SEQ ID NO: 31975 - DNA, 409 bp, Zea mays
  Clone ID: LIB3182-010-P2-M1-G10
attgagaccaacaagcaacatagaaagtggaatccagtagcaacaatagagcaacaatggcgaccaagatattttccctccttatgctccttgctctttctgcatgtgttgctaacgcgacaattttccctcaatgctcacaagctcctatagcttcccttcttcccccataccttccatcaatgatagcttcagtatgtgaaaacccagctcttcaaccctataggctccaacaagcaatcgcagcaagcaacatacctttatcacccttgtttcaacaatcgccagccctatctttggtgcagtcattggtacaaaccatcaaggcacagcagctgcagcaactcgtgctacctgtgatcaaccaaggagctctggcaaaccttttttcctactctcagcaacaaca

SEQ ID NO: 31976 - DNA, 284 bp, Zea mays
  Clone ID: LIB3182-010-P2-M1-G2
ggccgcccgtctctcccgagctaaactgtggcaggcagctagctgttacgagctagctccgcgcgcgctaggcggcgtcacgtacgtgctgtgatcaactgtctagttctctactcgacgcggacaccctgacccgcgcgcgcgccgtggccatggtcgccgccgccgccgccatcctcctggtcctgcccgtcgtcgccgtcctcgcgtcgtcgtccgcggcggcggacgggtcgttcataacgtgggacgacctcagcaccccgtccgccggcgccgtgcaa

SEQ ID NO: 31977 - DNA, 165 bp, Zea mays
  Clone ID: LIB3182-010-P2-M1-G3
atccgacctactcatgatacctctagaacggctggcgtgtagccaacttgggcaagtaatgggattgttaaagggggaactgaacgcttgatgggaaaacggcaggtggcttccatattcaggccacttgtatatgtacttctgataagaaaaatgggagttcgt

SEQ ID NO: 31978 - DNA, 63 bp, Zea mays
  Clone ID: LIB3182-010-P2-M1-G4
tctttcatttgcagctttctaacgtccggttcttttagtttcttttctttctttcttgctacg

SEQ ID NO: 31979 - DNA, 335 bp, Zea mays
  Clone ID: LIB3182-010-P2-M1-G7
gcaacatagaaagcacaatagtgtaccaacaatggcagccaaaatattttgcttccttatgctccttggtctttctgcaagtgctgctaccgcaaccattttcccacaatgctcacaagctcctatagcttcctttcttcccccatacctctcaccagcggtgtcttcagtatgtgaaaacccaatttttcaaccctacaggatccaacaggcaatcgcagcaggcatcttacctttatcacccttgttccttcaacaaccgtcagccctattacagcagttacctttggtgcatttgttggcacaaaacatcaaggtacaacaactacaacaac

SEQ ID NO: 31980 - DNA, 367 bp, Zea mays
  Clone ID: LIB3182-010-P2-M1-G8
aactagcaacatagaaagcacaatagtgtaccaacaatggcagccaaaatattttgcctccttatgctccttggtctttctgcaagtgctgctacggcgaccattttcccgaaatgctcgcaagctcctatagcttcccttcttcccccgtacctctcaccagcggtgtcttcggtatgtgaaaacccaattcttcaaccctacaggatccaacaggcaatcacagctggcatcttaccttttatcaccctttgtcctccaacaatcatcagccctattacattagttacctttggtgcatttattggcacaaaacattatggcacaacaactacaacaacttgggctagcaaaccttgcttgctac

SEQ ID NO: 31981 - DNA, 227 bp, Zea mays
  Clone ID: LIB3182-010-P2-M1-H1
aaacacaccaagcgaagcgcactagcaacgatctaacaacaattgctaccaagatattagctctccttgcgcttattgccctttttgtgagcgcatcaaatgcgtttattatttcacaatgtttacttgctcctagtgccattattctcacaatctctcaaccagttacttcaatgggctatttacacctagctgtgtaagctaacatgcaacaatcaagtgcttgt

SEQ ID NO: 31982 - DNA, 406 bp, Zea mays
  Clone ID: LIB3182-010-P2-M1-H2
cccggtcgtcgtcctatgcttgtccctgtctcggcaattctgggatactaaagaggaatcggtgaaggtccggtcttcgattccccgagatttgcatctgaatcttcttcttcttctcttttgcctccatggagtctcttgctgcgtgccactccatcgagcgagtctagcgcgcgcgacacagtagcagcagcaaagcagtccggtcggagaagcggaagttcgcgttgctttgctgatccaatgggggagaccaacgagctaccgtcgccacccgtggccgtgccgtcgcccatgatgccgatgcagtccattgaggtctgtgcaagcgtcattcacccgtcccacgagcagttccaccatcttaactactgcgtccactcaaattcatcctggggtaagggca

SEQ ID NO: 31983 - DNA, 367 bp, Zea mays
  Clone ID: LIB3182-010-P2-M1-H4
caactagcaacatagaaagcacaatagtgtaccaacaatggcagccaaaatattttgcctccttatgctccttggtctttctgcaagtgctgctacggcgaccattttcccgaaatgctcgcaagctcctatagcttcccttcttcccccgtacctctcaccagcggtgtcttcggtatgtgaaaacccaattcttcaaccctacaggatccaacaggcaatcacagctggcatcttacctttatcacccttgttcctccaacaatcatcagccctattacatcagttacctttggtgcatttattggcacaaaacatcagggcacaacaactacaacaacttgtgctagcaaaccttgctgcctac

SEQ ID NO: 31984 - DNA, 387 bp, Zea mays
  Clone ID: LIB3182-010-P2-M1-H5
gtcgcacatatctactatactatactctaggaagcaaggacaccaccgccatggcagccaagatgcttgcattgttcgctctcctagctctttgtgcaagcgccactagtgcgacccatattccagggcacttgccaccagtcatgccattgggtaccatgaacccatgcatgcagtactgcatgatgcaacaagggcttgccagcttgatggcgtgtccgtccctgatgctgcagcaactgttggccttaccgcttcagacgatgccagtgatgatgccacagatgatgacgcctaacatgatgtcaccattgatgatgccgagcatgatgtcaccaatggttcttgccgagcatgatgtcgcatatgatgaatccacaatgtcac

SEQ ID NO: 31985 - DNA, 121 bp, Zea mays
  Clone ID: LIB3182-010-P2-M1-H6
gtactagatagatagaatgcgctactgtgggcccaagggggcccacccgcatgtgcgacaacatacgctgcattgtactgtctcctaagtctgatcgcgagaccatctagtgacaacgata

SEQ ID NO: 31986 - DNA, 354 bp, Zea mays
  Clone ID: LIB3182-012-P2-M1-A1
agcatggcacttctatagcctccttgcagtgtcagcaagcgctaatacactgactgttattccacaacgctcacaacaataccatctatccgcgctacagccgtgggatttcaatacccaactatacaatcctacatggtacaagaggccattcaagccagcatcatactgtcattagcaattaatccttcaacaaccatatgcatctattgcaacagccatccttagggcaatttgtttcttcaaagaattgcagtacaactactacaacatcatatgctaccaacaattaatcaagttgttgtagataaacttgtctgttatctacaacaacaacagatgttatatatcaaa

SEQ ID NO: 31987 - DNA, 88 bp, Zea mays
  Clone ID: LIB3182-012-P2-M1-A10
tcgcaaaaacaggggccaaaaaggataaaaaaaaagtggggaaaagaacgccgggaatgggcaagcagcagcaggcgccaccggcgcg

SEQ ID NO: 31988 - DNA, 318 bp, Zea mays
  Clone ID: LIB3182-012-P2-M1-A12
ttcggcttggtcctccagtccatcctgcagcagcagccgcaaagcggccaggtcgcggggctgttggcggcgcagatagcgcagcaactgacggcgatgtgcggcctgcagcagccgactccatgcccctacgctgctgccggcggtgtcccccactgaagaaactatgtgctgtagtatagccgctggctagctagctagttgagtcatttagcggcgatgattgagtaataatgtgtcacgcatcaccatgggtggcagtgtcagtgtgagcattgacctgaatgaacaattgaaatgaaaagtaaatagtattgt

SEQ ID NO: 31989 - DNA, 296 bp, Zea mays
  Clone ID: LIB3182-012-P2-M1-A3
catgcaacatagaaagtggaatccagtagcaacagtagagcaacaatggcgaccaagatattttccctccttatgctccttgctctttctgcatgtgttgctaacgcgacaattttccctcaatgctcacaagctcctatagcttcccttcttcccccataccttccatcaatgatagcttcagtatgtgaaaacccagctctacaaccctataggctccaacaagcaatcgcagcaagcaacatacctttatcacccttgattcaacaatcgccagccctatctttggggcagtc

SEQ ID NO: 31990 - DNA, 236 bp, Zea mays
  Clone ID: LIB3182-012-P2-M1-A6
gacaaccctatactgctacaacacacacacacacacatgcataatggttggtacatggtaaaactatagcaagctaaggtcgatcgctcgtttatagctagaccactatcaccagtaccaacttcatggtttcttgactgatagattgacggacgagaatgaagaagctagctagctattatatataacattcagtgagtgatcagttgttgatgattgtccttatacctttgatc

SEQ ID NO: 31991 - DNA, 170 bp, Zea mays
  Clone ID: LIB3182-012-P2-M1-A7
ggaccagcaagcagccgccgcagtcggtccccaggcgcctctatatacggcacttcgacttcgatacattggcgacatcacacattacacacacttgggaactccatttcgaatctctttgtaattaacccattctttgtttctccgtctagcatgcttttactcttatt

SEQ ID NO: 31992 - DNA, 244 bp, Zea mays
  Clone ID: LIB3182-012-P2-M1-A8
ggcaaaccctgctgcctacttgcaacagctgcttccattcaaccaactgactgtgtcgaactctgctgcgtacctacaacagcgacaacaggtacttaatccactagcagtgcctaacccattggtcactgccttcctacagcagcaacaattgctaccatacagccagttctctttgatgaaccctgccttgtcgtggcagtaacccatcgttggaggtgccatcttttagattacatatgag

SEQ ID NO: 31993 - DNA, 164 bp, Zea mays
  Clone ID: LIB3182-012-P2-M1-A9
tcgatcaatcatcattcatcttagtagtataggcaccaaatcaaatctgcaacatcaattatctaactccaaaaaccatgaagctggtgcttgtggttcttgctttcattgcttttagtatcatgtgtatcttggacacagacaggccgctgcagttgtggtca

SEQ ID NO: 31994 - DNA, 334 bp, Zea mays
  Clone ID: LIB3182-012-P2-M1-B1
ctgccttcctacagcagcaacaattgctgccatacaaccggttctctttgatgaatcctgtcttgtcgaggcagcaacccatcgttggaggtgccatcttttagattacatatgagatgtactcgataatggtgccctcataccggcatgtgtttcctagaaataatcaatatattggttgagatttatctcgaaaacaaaacaaaaaaaagaaaagaaaaaaaaaacaacaaaaaaataacaaaaatgagccacctaaacaaaaaaaaaattttgacgactttttataaaaagaaaatgcatacaataaaacccattattttttgccaaaatt

SEQ ID NO: 31995 - DNA, 68 bp, Zea mays
  Clone ID: LIB3182-012-P2-M1-B2
aaaatataaaaaaaaaaaaaaaaaaaaaaagaagggagaataataaaaaaagatgaataatataataa

SEQ ID NO: 31996 - DNA, 390 bp, Zea mays
  Clone ID: LIB3182-012-P2-M1-B3
gaccaactagcaacatagaaagcacaatagtgtaccaacaatggcagccaaaatattttgcctccttatgctccttggtctttctgcaagtgctgctacggcgaccattttcccgaaatgctcgcaagctcctatagcttcccttcttcccccgtacctctcaccagcggtgtcttcggtatgtgaaaacccaattcttcaaccctacaggatccaacaggcaatcacagctggcatattacctttatcacccttgttcctccaacaatcatcagccctattacatcagttacctttggtgcatttattggcacataacatcagggcatcacaactacaacatcttgtgctagcaaaccttgctgtctactcttagcaacagtagtttct

SEQ ID NO: 31997 - DNA, 390 bp, Zea mays
  Clone ID: LIB3182-012-P2-M1-B4
attagctttatctactccagagcgcagaagaacccgatcgacaccatgagggtgttgctcgttgccctcgctctcctggctctcgctgcgagcgccacctccacgcatacaagcggcggctgcggctgccagccaccgccgccggttcatctaccgccgccggtgcatctgccacctccggttcacctgccacctccggtgcatctcccaccgccggtccacctgccgccgtcggtccacctgccaccgtcggtccatgtgccgtcgttggttcatttgccgccgccaccatgccactaccctacttaaccgtcccggcctcagcctcatttccagccatacccatgcccgtgccaacagacgtattctaatcccgtgccagttgctttg

SEQ ID NO: 31998 - DNA, 144 bp, Zea mays
  Clone ID: LIB3182-012-P2-M1-B5
atttataatcacaccaagcgaagtgcactaacaacaacctaacatcatgggctaccaagatattagcccttcttgcgcttcttgcccttctagcgagagcaacaaatgcgatcataatttcacagtgcttaattgcatctagtg

SEQ ID NO: 31999 - DNA, 308 bp, Zea mays
  Clone ID: LIB3182-012-P2-M1-B6
tcgaccgatcgatcgccacagccaacaccacccgccgaggcgacgcgacagccgccaggaggaaggaataaactcactgccagccagtgaaggggtagaagtttactgtttctttgatcagtgtgtgtaccgtctgttagttttgctcatctttttttcttttatttgttattttctttattttgtgttttttttattttttatttttgtatattttggttctttttttttttttttttttataatatttttttttattctttttttatattttatctttttttaatttcttgttttttttatgtttt

SEQ ID NO: 32000 - DNA, 424 bp, Zea mays
  Clone ID: LIB3182-012-P2-M1-B7
gcgcaacaaatgcgttcattattccacaatgctcacttgctccaagttccattattacacagttcctcccaccagttacttcaatgggcttcgaacacccagctgtgcaagcctataggctacaacaaggcagttgcggcgagcgtcttacaacaaccaatttcccagttgcaacaacaatccttggcacatctaacaatacaaaccatcgcaacgcaacagcaacaacaattcctaccagcactgagccacctagccatggtgaaccctgccgcctacttgcaacagcagttgcttgcatcaaacccacttgctctggcaaacgtagttgcaaaccaaccacaacaacagttgcaacagtatctgccagcgcttagtcaactagtcatggtgaaccctggcgcctacctacaacaggatcaac

SEQ ID NO: 32001 - DNA, 386 bp, Zea mays
  Clone ID: LIB3182-012-P2-M1-B9
gagcattcagaaacacaccaagcgaagcacattagcaacaacctaacaacaatggctaccaagatattatccctccttgcgcttcttgcgctttttgcgagcgcaacaaatgcgttcattattccacaatgctcacttgctccaagttccattattacacagttccttccaccaggtacttcaaaggccctatgaacacccagctgtgcaagcctataggctacaacaagcaattgcggtgagcgtcttacaacaaccaaattctcagttgcatcaacaatctttggcacatttaacattactaaccatcgtaacgtattagcaacatcattttctaccagcactgagtcacctagccatggggaacccttccgcttactttcaac

SEQ ID NO: 32002 - DNA, 177 bp, Zea mays
  Clone ID: LIB3182-012-P2-M1-C1
ccaatccagatcagcaaagcggcagtgcgtagagaggatcgtcgaacagaacagcatgaagatggtcatcgttctcgtcgtgtgcctggctctgtcagctgccagcgcctctgcaatgcagatgccctgcccctgcgcggggctgcagggcttgtacggcgctggcgccggcctgac

SEQ ID NO: 32003 - DNA, 199 bp, Zea mays
  Clone ID: LIB3182-012-P2-M1-C11
tcgagaccattagctttatctactccagagcgcagaagaacccgatcgacaccatgagggtgttgctcgttgtcctctctcttctgtctttcgttgctagtgctactttttctcatacattttgcttttttatctgtctgttcatatttttatttattcttcttgttttttttttttttatattttatttattgttttt

SEQ ID NO: 32004 - DNA, 369 bp, Zea mays
  Clone ID: LIB3182-012-P2-M1-C12
gccgtggtcaagttcaacgcggcgctggcgcaccacatcatggccggcgccgacgtgctcgccgtcaccagccgcttcgagccctgcggcctcatccagctgcaggggatgcgatacggaacgccctgcgcctgcgcgtccaccggtggactcgtcgacaccatcatcgaaggcaagaccgggttccacatgggccgcctcagcgtcgactgtaacgtcgtggagccggcggacgtcaagaaggtggccaccacattgcagcgcgccatcaaggtggtcggtacgccggcgtacgaggagatggtgaggaactgtatgatccaggatctctcctggaaaggccctgccaagaactgtgataacgttctg

SEQ ID NO: 32005 - DNA, 199 bp, Zea mays
  Clone ID: LIB3182-012-P2-M1-C2
acaatgcagatgagtaaagcacaagtccggagagaggatcgcagcacagtacagtctgaagatgctaatagttttcgccttcttgctctctttgccctctcacagtgcctattaaatgcatataccatttcacagtgctgatttgttccactatgccattatttcacatttactaccacttatttcttcaatggtcttc

SEQ ID NO: 32006 - DNA, 226 bp, Zea mays
  Clone ID: LIB3182-012-P2-M1-C5
aaaaaaacaaaaaaaaaaaggagaaaaaaaaaaaaaaaaaaaaaaaaaaaaaaaaaaaaaaaaaaaaaaaaaaaaaaaaaaaaaaaaaaaaaacaaaaaaaaaaaaaaaaaaaaaaaaaaaaaaaaaaaaaaaaaaaaaaaaaaaaaaaaaaaaaaaaaaaaaaaaaaaagaaaaaaaaaaaaaaaaaaaaaaaaaaaaaaaaaaaaaaaaaaaaaaaaaaaaaaa

SEQ ID NO: 32007 - DNA, 411 bp, Zea mays
  Clone ID: LIB3182-012-P2-M1-D12
ttattgagaccaactagcaacatagaaagcacaatagtgtaccaacaatggcagccaaaatattttgcttccttatgctccttggtctttctgcaagtgttgctaccgcaaccatttttccacaatgctcacaagctcctatagctttccttttttccccataccttttaccagcggtgtcttcaatgtgtgaaaacccaattgtttaaccctacaggatccaacaggcaatcgtaacaggcattttaccattatcacccttgtttcttcaacaaccgttagccctattacagcagatacctttggtccatttggtggtacaaaacattatggctcaacaactacaataacttgggcttgttaactttgctgcattctttcaactccatagtttcttcattcaaccaactg

SEQ ID NO: 32008 - DNA, 64 bp, Zea mays
  Clone ID: LIB3182-012-P2-M1-D3
tcgtatcaacgcaaattgcaccaagaaatccatcgagaggccgttgacagggtaattaatgtct

SEQ ID NO: 32009 - DNA, 168 bp, Zea mays
  Clone ID: LIB3182-012-P2-M1-E3
gggatgaccctgactggaaaaaccataaccctggaggatgagagctcggacaccatccacaatgtgaaggcgaagatccacgacaaggagggcattcccccggaccagcagagtttgaacttctccggcaaacagctggaggatggccgcacccttgcagactacaac

SEQ ID NO: 32010 - DNA, 394 bp, Zea mays
  Clone ID: LIB3182-012-P2-M1-F1
caggcgcccatatatgctatactatactctaggaagcgaggaccccagcggcacggcagtcaagacgctcgtatgcgttcgcgctcttagcgtctgggcgcgcgcgcctcgagcgacccatattgcagacaagttgctatcagtcatgtcattgcgtaccacgaaccatatagcaggcagctctgcattgtgcaaccagagctcgtcagctttatgggcgtcgaacgcgcctgacgctgcaagcaccatacctctatacacccttggatcaacaacgggcaggcgtatctatggtgggtcattagcacgaaccatcagtggacagcagctgcagtgactcgcgctacctgtgagcaaccaaggagctctggcagacctttctccctactcttaa

SEQ ID NO: 32011 - DNA, 340 bp, Zea mays
  Clone ID: LIB3182-012-P2-M1-F11
tcggttctagatcgcgatcgtccgttctatggggatccatgtcttactttcgcttgtattgttttttcttatttcttttatatttttacattttttttattatctctttattttttttttcttttatatgcttatttttgttttctctttttttatttttttttttctttttttttttttttttttattattcatttttttttttattttttttaatctttcttttttttcatttttttttttttctttttttttttttttttctcttttcttttttttcttattttctatttttttatatttttatttttttttttttcattttttatttttttttttt

SEQ ID NO: 32012 - DNA, 119 bp, Zea mays
  Clone ID: LIB3182-012-P2-M1-F12
cagaccattagctttatctactccagagcgcagaagaacccgatcgacaccatgagggtgttgcttggtgccctcgcttttctggcttttgcttcgagcgccaactttacgcatacaag

SEQ ID NO: 32013 - DNA, 239 bp, Zea mays
  Clone ID: LIB3182-012-P2-M1-F2
cttgcttgtgctagtgtaatgtagtgtagtggtggccagtggcacaacctaataagcgcatgaactaattgcttgcgtgtgtagttaagtaccgatcggtaattttatattgcgagtaaataaatggacctgtagtggtggagtaaataaataaaaaaaaaaaaaaataaaataaataaaaaaaaatatatataaataactttatttaatataaaaaaattaaaatattaattatattt

SEQ ID NO: 32014 - DNA, 305 bp, Zea mays
  Clone ID: LIB3182-012-P2-M1-G1
gagttctataagaagacattcaatgagtttttggaccctcttgctcacactcacttcacaactgagggtgaggtggaattcaggagtgttctttatgttccgggcatggcgcctcttagtaatgaggagataatgaaccccaagaccaaaaatatccggctatatgttaaaagagtattcatctctgatgactttgatggtgaactgtttccaagatacttgagctttgtgaaaggtgtggtggatttaaatgatctttcctttaacgtattcttggttgattctttatgaaagttgtttttgta

SEQ ID NO: 32015 - DNA, 418 bp, Zea mays
  Clone ID: LIB3182-012-P2-M1-G12
ctggacgtcagcctagcaattagctcatcgactccagattggagaactcgacaccatgaaggtgctgatcgttgcccttgctctcctggcgctcgctgcgagcgccgcctccagtacaagcggcggctgtggctgccagacaccaccgtttcatctaccgcctccgttctatatgccgcctccgttctatctgccgccgcagcagcagccgcagccatggcaataccccactcaaccaccgcagctaagcccgtgccagcagttcggatcctgcggcgtcggcagcgtcggcagcccgttcctgggccagtgcgtcgagttcctgaggcaccagtgcagcccggcggcgacgccctacggctcgccacagtgccaggcgctgcaacagcagtgctgccaccagatcaggcaggtggag

SEQ ID NO: 32016 - DNA, 390 bp, Zea mays
  Clone ID: LIB3182-012-P2-M1-G2
gggtttttgattttagccgccgccgctgctcatctcacatccctcgagaagacgcctgctcctcgccgatcgatacgatggccgtcttctccgacctccacaccgccgacggcctcaagtccctcgaggctcacctcgccggcaaaacctatgtgtctggtgactccattactaaggatgacattaaggtcttcgccgcggtgccgtcgaagcctggcgctgagtttcctaatgccgcccgctggtacgagaccgtctctgcggctgtagcctcaagattccctggtaaggctgttggtgtaaatctgcctgcgggatcagctcctgcggcagctgctcctgcggatgaggctgaggatgatgatgaccttgatctttatggtgatgaaa

SEQ ID NO: 32017 - DNA, 339 bp, Zea mays
  Clone ID: LIB3182-012-P2-M1-G3
atccgcagagagcttgttccgtccaggcaaccaaaaagcaagttgccccgccgcgcagaggaagaagagagcagaggaggatggctcgtacgaagcagaccgcccgcaagtccacgggaggcaaggccccccgcaagcagctcgccaccaaggcggcgaggaagtcggcgccgacgaccggcggcgtgaagaagccccacaggtacaggcccggaaccgtggcgctgcgcgagatccgcaagtaccagaagagcacggagctgctgatccgcaagctgccctttcagcgcctggtgcgcgagatcgctcaggacttttagacagacctttcgattcaga

SEQ ID NO: 32018 - DNA, 315 bp, Zea mays
  Clone ID: LIB3182-012-P2-M1-H1
cgcctgcaaggcgaaacccctcaagggaaaggctagcagcaacgagcgcgcgtcgcccagccctactcagaggcagcatcagcaggagacggaggagctggagctggaaccggtgccgatggtcgtcgagcttgagcacggcgaggagtccgccggcagccacgaccaccaccaccaccacttgcagccgcagggatcgtcggaggacaccgacgtggaggccgtcttccacgtgagccaggccgaggccgagccgccggtcagcagccagagccaggcgctggtggcggaccaggagggagaggaggtaagtct

SEQ ID NO: 32019 - DNA, 419 bp, Zea mays
  Clone ID: LIB3182-012-P2-M1-H3
gtcacccattaccatgcacggcagggggagcacagtcctaacagactcacagcaatggctagcaatatattatacctacatgcgcttattgcgctttttgcgagcgcaacaaatgcgttcattattccacaatgctcacttgctccggggtccattattacacagcaagtttaaccagttacttaaatgagctttgaacacccagttgtgcaagcctataggctacaacaggccattgctgtacagcgtcttacacacaaccaaactcccaggtgcaacaacataatcttggtacatctaacactacataccatcgcatcgcaacaaaaacaacaattcctaccagaactgagtcacctagacatggtgaaccctgtcggctacttgcaacagcagttgcttgcatcaaacccacttgc

SEQ ID NO: 32020 - DNA, 75 bp, Zea mays
  Clone ID: LIB3182-012-P2-M1-H4
tgaaaagataagacaggcttatattgagaaagaggatagcaagatgtttaaacagaaacattgtatgataatgct

SEQ ID NO: 32021 - DNA, 111 bp, Zea mays
  Clone ID: LIB3182-012-P2-M1-H9
tctctatcttattaactttatctactccagtgtcttcattttcttaatttattattaattttttatttttttaattttttttttttcatattttttttattttttttttat

SEQ ID NO: 32022 - DNA, 403 bp, Zea mays
  Clone ID: LIB3182-013-P2-M1-A1
ctcagcaacaacaatttcttccattcaaccaactagctgcattgaactctgcttcttatttgcaacaacaacaactaccattcagccagctatctgctgcctacccccagcaatttcttccattcaaccaactgacagctttgaactctcctgcttatttacagcagcaacaactactaccattcagccagctagctggtgtgagccctgctaccttcttgacacaaccacaattgttgccgttctaccagcacgctgcgcctaacgctggcacccttttacaactgtaacaattgctgccattcatccaacttgctttgacaaacccaacagtattcttacaacaacccattattggtggtgccctcttttagattttttatgagttttagttcaatataaa

SEQ ID NO: 32023 - DNA, 155 bp, Zea mays
  Clone ID: LIB3182-013-P2-M1-A11
gtcgtaggtctctggccgtccatctgccggactctatgcgtgcggcatgcgcattgctaagctgcctctacgtgtagcggcagaccgagacgcgcgcatgtcgggggttatacgacattatcccagcataaaatctcctggccattgaagacaat

SEQ ID NO: 32024 - DNA, 128 bp, Zea mays
  Clone ID: LIB3182-013-P2-M1-A12
ctcagcctcatccccagccacacccatgcccgtgccaacagccgtatccaagcccgtgccagctgtagggaacctgcggcgttggcagcactctgatcctgggccagagcgtccagtatctgaggcat

SEQ ID NO: 32025 - DNA, 57 bp, Zea mays
  Clone ID: LIB3182-013-P2-M1-A2
tagcaacatacatagtgtagtacagtagcaacattttacaccaatggtagacaagat

SEQ ID NO: 32026 - DNA, 393 bp, Zea mays
  Clone ID: LIB3182-013-P2-M1-A3
attttgagcattcagaaacacaccaagcgaagctacctagcaacgacttaacaacaatggctaccaagatattagccctccttgcgcttcttgccctttttgtgagcgcaacaaatgcgttcattattccacaatgctcacttgctcctagtgccattataccacagttcctccgaccagttacttcaatgggcttcgaacacctagctgtgcaagcctacaggctacaacaagcgcttgcggcgagcgtcttacaacaaccaattaaccaattgcaacaacaatccttggcacatctaaccatacaaaccatcgcaacacaacagcaacaacagtttctaccagcactgagccaactagatgtggtgaaccctgtcgcctacttgcaacagc

SEQ ID NO: 32027 - DNA, 327 bp, Zea mays
  Clone ID: LIB3182-013-P2-M1-A4
aaaaaaaaacaaagaaaatcaataaagaaaacaaaaataaaaaaaaaaacaaaaaaatacaacaaaaaacaaaaaaaaaaaaaaaaaagaacaaaaaaaaaaaaaaaaaaaaaaaaaaaaaaaaaaaaaaaaaataagaaaaaaaaaataaaaaagaatataaaaaaaaaaaaaaaaaaaagaaaaaaaagaaaaaaataaaaatataaaaaaaaaaaacattacaaacaataaaaaaccaaaaaaaaataaaaaaagaaaaaaaaaaataaacaaaacaaaataatcaaaaaaaataaaaaaaacagaaaaaaaataaaaaaaaaa

SEQ ID NO: 32028 - DNA, 274 bp, Zea mays
  Clone ID: LIB3182-013-P2-M1-A6
tccgcctaacctttcgattgctcgccgcccgccgttcgctgctgcccgtcgttcgtcttggactttttatggctagtgtttcttttgtccttttttgcttttttttattttattttttgtttttttttatttttatttttatttttatttttttttttttttttttatttttattttttttttttttttttttttttttttattttttttttttttttttttttttttttttatttttctttttttttttttttttatttttcttttttatttt

SEQ ID NO: 32029 - DNA, 67 bp, Zea mays
  Clone ID: LIB3182-013-P2-M1-B11
atgcgacgttttatctcttctatagtgtcatctaaattcatttcactgtccgtcgttttacaactgt

SEQ ID NO: 32030 - DNA, 190 bp, Zea mays
  Clone ID: LIB3182-013-P2-M1-B2
ggacgtcagcctagcaattagctcatcgactccagattggagaactcgacaccatgaaggtgctgatcgttgcccttgctctcctggcgctcgctgcgagcgccgccttcagtacaagcggcggctgttgctgccagacaccaccgtttcatctaccgtctccgttctatatgccgccttcggtttatct

SEQ ID NO: 32031 - DNA, 404 bp, Zea mays
  Clone ID: LIB3182-013-P2-M1-B3
aagcaacatagaaagtggaatccagtagcaacaatagagcaacaatggagaccaagatattttccctccttatgctccttgctctttctacatgtgttgctaacgcgacaattttccctcaatgctcacaagctcctatagcttccctttttcccccataccttccatcaattatagcttcagtatgtgaaaacccagctcttcaaccatataggcttcaacaagcaatcgcagcaagcaacatacctttatcgcccttgttgtgtcaacaatcgccagccctatctttggtgcagtcattggtacaaaccatcagggcacaacagctgcagcaactcgtgctacctgtgatcaaccaagtagctctggcaaacctttcttcctactcttcgtaacaacaattt

SEQ ID NO: 32032 - DNA, 81 bp, Zea mays
  Clone ID: LIB3182-013-P2-M1-B4
aaaaaaaaagaaacaaaaaaacgaccaacaaaaaaaaaataaaaaaaaaaacaccaacgacacaaaaaaccacaacaaaaa

SEQ ID NO: 32033 - DNA, 67 bp, Zea mays
  Clone ID: LIB3182-013-P2-M1-B5
tttgtacacaactagccacagatgcagcaaagggcacaaaacacaagggcacaccaactactacaac

SEQ ID NO: 32034 - DNA, 300 bp, Zea mays
  Clone ID: LIB3182-013-P2-M1-C10
gaccaacaagcaacatagaaagtggaatccagttgcaacaatagagcaacaatggcgaccaagatattttccctccttatgctccttgctctttctgcatgtgttgctaacgcgacaattttcccttaatgctcacatgctcctatagcttaccttcttcccccataccttccatcaatgatagcttcagtatgtgaaaacccagctctttaaccctataggctccaacatgcaatcgcattatgcaacatacctttattacccttgtttcaacaatttccagccctatctttgttgcag

SEQ ID NO: 32035 - DNA, 336 bp, Zea mays
  Clone ID: LIB3182-013-P2-M1-C3
tcgttcgacccctcatcccctccctgacatggccgacaacgcgaaggccgtggcggctcatgcgaggccggagtcgttgcaggaggaggtggaggactgttaagatttcttttgttattctttttttttttttttttatttactatttttattaaattttacttattttttatctttttttattacattttttttatcttttttttttattttttattcttttagttttttatctaatttattttatttttttattcttattatttatactaacttatctttttaattcttattatatttttttatcttctacattatttttataatctatttttc

SEQ ID NO: 32036 - DNA, 225 bp, Zea mays
  Clone ID: LIB3182-013-P2-M1-D3
attagctttatctactccagagcgcagaagaacccgatcgacaccatgagggtgttgctcgttgccctcgctctcctggctctcgctgcgagcgccacctccacgcatacaagcggcggctgtggctgccagccaccgccgccggttcatctaccgccgtcggtgcatctgccaccttcggttcacctgccacctccggtgcatctcccaccgccggttcatctg

SEQ ID NO: 32037 - DNA, 364 bp, Zea mays
  Clone ID: LIB3182-013-P2-M1-D9
ctactatactatactctaggaagcaaggacaccaccgccatggcagccaagatgcttgcattgttcgctctcctagctctttgtgcaagcgccactagtgcgacccatattccagggcacttgccaccagtcatgccattgggtaccatgaacccatgcatgcagtactgcatgatgcaacaggggcttgccagcttgatggcgtgtccgtccctgatgctgcagcaactgttggccttaccgcttcagacgatgccagtgatgatgccacagatgatgacgcctaacatgatgtcaccattgatgatgccgagcatgattgtaccaatggtcttgcccgagcatgatgtcacaaatgatgatg

SEQ ID NO: 32038 - DNA, 122 bp, Zea mays
  Clone ID: LIB3182-013-P2-M1-E3
gcccagcatgttgaggaggccgagaagatgggacttgactacatggatgttgaggctctcaagaaaatgaacaagaacaagaagcttgttaagaggtttgtcaagaattactatgctttttt

SEQ ID NO: 32039 - DNA, 282 bp, Zea mays
  Clone ID: LIB3182-013-P2-M1-E6
agaccaactagcaacatagaaagcacaatagtgtaccaacaatggcagccaaaatattttgcctccttatgctccttggtctttctgcaagtgctgctacggcgaccatttttccgcattgctcgtaagcttctatagcttctctttttcccccgtacttctcacctgcgtcgtcttctgtatgtgaaaactcaattcttcaaccctacatgtttcttcatttaatcgtagctttgcaactttcctttattactcttggtcctccatcattcttcactccta

SEQ ID NO: 32040 - DNA, 166 bp, Zea mays
  Clone ID: LIB3182-013-P2-M1-F7
gagaaccatcgcctgcatttcgatctgtttcaccgcaattcgcattgttagtcgtgtattggagttatgtgtacttggtttccaagaactttggttccttgcttttttttctttcttgtttgagctgtttttggtctagcgctggccttggctcctagtatgtttc

SEQ ID NO: 32041 - DNA, 129 bp, Zea mays
  Clone ID: LIB3182-013-P2-M1-F8
tcgattttgagcattcagaaacacaccaagcgaagcgcactagcaacatcctaacaacattggttaccaagatattatcccttcttgcgcttctagcgctttttgagagcgcatcaaatgcgtccatta

SEQ ID NO: 32042 - DNA, 58 bp, Zea mays
  Clone ID: LIB3182-013-P2-M1-G1
atgcgacgtcatatctcttttatagtgtcacctaatttcaatttactgtccgtttttt

SEQ ID NO: 32043 - DNA, 234 bp, Zea mays
  Clone ID: LIB3182-013-P2-M1-G12
tcggagcccaggcagccatggtcctactcctccgtcccgtccgggtccgggtccggccttgcgcagttcgtccgtctttatgagcaagggagcatgcaccgatccccattccgacccttctcccagtcctgtgcggttggggcgacacactttcatgtgcgaccaatgaactcaccatgtttcaggtatcggtggattgaatattttctacgttacacttctttctatctttcc

SEQ ID NO: 32044 - DNA, 317 bp, Zea mays
  Clone ID: LIB3182-013-P2-M1-G3
cgttagactaggttaggctaggctagggtgtcaaccagctcgcggtaatggtggccttcaggttccattagtaccaggtggggggactcccccttccaaaccccggttttattcccccatatttttatccacttattctttttctcccccaaatattaagttctttacctataataaattattattattaacttttttttatggatttttaaaaaattatgtttttaaatttttatattttttaatctaatttttattctaatttcatcattatttttttatattatttatctctcctattatttattacttttaat

SEQ ID NO: 32045 - DNA, 85 bp, Zea mays
  Clone ID: LIB3182-013-P2-M1-G6
ttacgcgccctgtaacgtccatttaagtctgcggatgtgttgtctatttttatttattttttctttacttcttattttccttttt

SEQ ID NO: 32046 - DNA, 65 bp, Zea mays
  Clone ID: LIB3182-013-P2-M1-G9
tgtgactacttcttctttgttatctcaatttttttgcaaattatctaaatttctcatcctttcat

SEQ ID NO: 32047 - DNA, 407 bp, Zea mays
  Clone ID: LIB3182-013-P2-M1-H1
catacatagtgaaggacactagcaacatgttagcaccaatgggagccaagatttttgccctccttgccctccttgctctttcagcaagcgctgctacctcgacttttattccacaatgctcacaacaatacctctctccggcgacagccgtgggatttcaatacccaactatacaatcctacatggtacaagaggccatccaagcacgcatcttacggtcattagcattaaccctccaacaaccatatgctctattgcaacagccatccttagtgcatctgtatctccaaagaatcgcggcacaacaactacaacaacagttgctaccaacaatcaatcaagtacttgcagcgaaccttgctgcttacctccagcaacaacagtttcttccatttaatcaactagat

SEQ ID NO: 32048 - DNA, 65 bp, Zea mays
  Clone ID: LIB3182-013-P2-M1-H11
aattctagatcgctcacgacctacataaaggagcgaaagtaaagcacgctggctattaacagaat

SEQ ID NO: 32049 - DNA, 151 bp, Zea mays
  Clone ID: LIB3182-013-P2-M1-H2
caacgcgctctgttatggcacattaagtgcgtagggcgtgtggttctccaaagattcgagctttaactactacaacaacttttgcttcctacaatcaattttgttgttttaagtatccttgctgcttatcttcatcaccatctattttttt

SEQ ID NO: 32050 - DNA, 81 bp, Zea mays
  Clone ID: LIB3182-013-P2-M1-H3
cctaccgatcgtcaagtctctatgtgaggcatgcggctagcacgccgtttacatcaagtaatatctttttggagcctggtt

SEQ ID NO: 32051 - DNA, 294 bp, Zea mays
  Clone ID: LIB3182-013-P2-M1-H5
agatctagatcgcgcgcgacctacatagaggagcgatgctaaagctcgctggctagtaacagcatatctcttctatagcagttactaaatagaattattgaacctgtgctttcatctgcaacaacagcaaataccatgcagtcacctaacttatgcctatcgcaagaaattccttttattcaagctactggaataattaaaatgtcctgattatttacagttccaaccagtagtacaatttaaatggctaatgggacgcggccttgataccttctttaaacaaccacagttggt

SEQ ID NO: 32052 - DNA, 408 bp, Zea mays
  Clone ID: LIB3182-014-P2-M1-A10
gaccaactagcaacatagaaagcacaatagtgtaccaacaatggcagccaaaatattttgcttccttatgctccttggtctttctgcaagtgttgctaccgcaaccattttcccacaatgctcacaagctcctatagcttcccttcttcccccatacctctcaccagcggtgtcttcaatgtgtgaaaacccaattgttcaaccctacaggatccaacaggcaatcgcaacaggcatcttaccattatcacccttgttcctccaacaaccgtcagccctattacagcagttacctttggtccatttggtggcacaaaacatcagggcacaacaactacaacaacttgtgctagcaaaccttgctgcatactctcagcaacatcagtttctttcattcaaccaactggc

SEQ ID NO: 32053 - DNA, 401 bp, Zea mays
  Clone ID: LIB3182-014-P2-M1-A12
aacatacatagtgaagtacactagcaacatcttagcaccaatgggagccaagatttttgccctccttgccctccttgctctttcagcaagcgctgctacctcgacttttattccacaatgctcacaacaatacctctctccggcgacagccgtgggatttcaatacccaactatacaatcctacatggtacaagaggccatccaagcaagcatcttacggtcattagcattaaccctccaacaaccatatgctctattgcaacagccatccttagtgcatctgtatctccaaagaatcgcggcacaacaactacaacaacagttgctaccaacaatcaatcaagtagttgcagcgataccttgcttgttacctccagcaacaacagtttcttccattcaat

SEQ ID NO: 32054 - DNA, 319 bp, Zea mays
  Clone ID: LIB3182-014-P2-M1-A2
tcgtacagtttcttccaccaggtacttcaatgggcttcggggacccagctgtacaagcctataagctacaacaagctatttgtgcgagcgttttacaacaaccaattttccatgtgcaacagcaatccttgtctcatttaacaatacaaaccattgctatcgcaacagcaacaacaattccttaccagactgagccacctagccaaggtgaaccctgccgtctacttgcaacatcagatgcttgcttcaaacccaattgctctgtcaaacgttattgcaaaccatacattacatcaaatgcaacagtttctgccatctc

SEQ ID NO: 32055 - DNA, 425 bp, Zea mays
  Clone ID: LIB3182-014-P2-M1-A3
cggacgcgtgggattgagaccaactagcaacatagaaagcacaatagtgtaccaacaatggcagccaaaatattttgcctccttatgctccttggtctttctgcaagtgctgctacggcgaccattttcccgaaatgctcgcaagctcctatagcttcccttcttcccccgtacctctcaccagcggtgtcttcggtatgtgaaaacccaattcttcaaccctacaggatccaacaggcaatcacagctggcatcttacctttatcacccttgttcctccaacaatcatcagccctattacatcagttacctttggtgcatttattggcacaaaacatcagggcacaacaactacaacaacttgtgctagcaaaccttgctgcctactctcagcaacagcagtttcttccattcaaccaactagc

SEQ ID NO: 32056 - DNA, 416 bp, Zea mays
  Clone ID: LIB3182-014-P2-M1-A4
attgagaccaacaagcaacatagaaagtggaatacaggagcaacaatagagcaacaatggcggccaagatattttccatccttatgctccttgctctttctgcatgtgttgctaacgcgaccatttttcctcaatactcacaagctcctatagctgcccttcttcccccataccttccatcaatgaccgcttcagtatgtgaaaacccagcccttcaaccctacaggctccaacaagcaatcgcaacaagcaacttacctttatcacccctgttctttcaacaatcgccagccctatctttggtgcagtcattggtacaaaccatcagggcacaacagctgcagcaactcgtgctaccagtgatcagccaagtagctttggcaaacctttctccctactctcagaacaacaatttc

SEQ ID NO: 32057 - DNA, 229 bp, Zea mays
  Clone ID: LIB3182-014-P2-M1-A5
tttcggaccaactagcaacatagaaagcacaatagtgttcgggcaatggcagtcaaaatattttgcttccttatgctccttggtctttctgcaagtgctgctaccgcaaccatttttccacattgctcacaagctctatatagattcctttttttccccatacctttaaccagcggttgtttcagtgtgtgaaaaccctattcttctatcctacatgatccaacatgct

SEQ ID NO: 32058 - DNA, 433 bp, Zea mays
  Clone ID: LIB3182-014-P2-M1-A6
tctaactagcaacatagaaagcacaatagtgggccaacaatggcagccaaaatattttgcctccttatgctccttggtctttctgcaagtgctgctacggcgaccattttcccgaaatgctcgcaagctcctatagctttccttttttccccgtacctcttaccagcggtgtctttggtatttgaaaacccaattcttcaaccctacaggatccaacaggcaatcacagctggcatcttacctttatcacccttgtttctccaacaatcattagccctattacatcaattacctttggtgcatttattggcacataacattagggcacaacaactacaacaacttgttgtagcaaaccttggtggctacttttaacaacaggagtttctttcattctaccaactatgctgattgaacctcttgtttttatttg

SEQ ID NO: 32059 - DNA, 403 bp, Zea mays
  unsure at all n locations
  Clone ID: LIB3182-014-P2-M1-A9
attccctcctgtctcctgaagcaagcgcagcaatgccagctcttcccgcttttcccctcacccgccgcccatccgatgccagacgccgcggtcgcctcgtcctttccctcgtcgtcttcgttgctgtctccgccgccgcagccctcgcctacctatctttcccctctgccgggcggacatcgcccccggcggtccggacggaggccgactgctgcaggggtatggagggcctcgagctctggggcccggcggtcaagtggggctcagaccaccgtctgccctccgccggcgtctgctgcgccgcctgcaaggccatgtgccctcaccataaggacggngcctgccgctgcgactcgtgggtcttctgcggggacgagcgcaaatgcaaagacaggctcgggga

SEQ ID NO: 32060 - DNA, 326 bp, Zea mays
  Clone ID: LIB3182-014-P2-M1-B1
tgcctatccacttctccatcaccacctcgggctatcaagaccattcactttatttactttacttctcctaataaccctatcgacaccatctaggtacgcttatcattttcctacatctcctacatctagctataagctccttctttaccccttccctcggaggatgctggtgtcaaccaccgacaacacctaatctacaaccgtacaagcatcaaccacctacgggtaacctgcaacttaccttaaatatcccaccgccattaacaactgcctatgcctatttcacctaacaccctcggttcattttcctgcctcatttcatttat

SEQ ID NO: 32061 - DNA, 420 bp, Zea mays
  Clone ID: LIB3182-014-P2-M1-B11
tgagaccaacaagcaacatagaaggtggagggccagtagcaacaatagagcaacaatggagaccaagatattttccctccttatgctccttgctctttctacatgtgttgctaacgcgacaattttccctcaatgctcacaagctcctatagcttccctttttcccccataccttccatcaattatagcttcagtatgtgaaaacccagctctttaaccatataggcttcaacaagcaatcgcagcaagcaacatacctttatcgcccttgttgtgttaacaatcgccagccctatctttggtgcagtcattggtacaaaccatcagggcacaacagctgcagcaactcgtgctacctgtgatcaaccaagtagctctggcaaaccttttctccctactctacggaacaacaattttttt

SEQ ID NO: 32062 - DNA, 394 bp, Zea mays
  Clone ID: LIB3182-014-P2-M1-B12
aacaagcaacatagaaagtgggatccaggggcaacaatagagcaacaatggagaccaagatattttccctccttatgctccttgctctttctacatgtgttgctaacgcgacaattttccctcaatgctcacaagctcctatagcttccctttttcccccataccttccatcaattatagcttcagtatgtgaaaacccagctcttcaaccatataggcttcaacaagcaatcgcagcaagcaacatacctttatcgcccttgttgtgtcaacaatcgccagccctatctttggtgcagtcattggtacaaaccatcagggcacaacagctgcagcaactcgtgctacctgtgatcaaccaagtagctctggcaaacctttcttcctactctcc

SEQ ID NO: 32063 - DNA, 428 bp, Zea mays
  Clone ID: LIB3182-014-P2-M1-B2
gcaacatagaaagcacaatagtgtaccagcaatggcaggcaaaatattttgcctccttatgctccttggtatttctgcaagtgctgctacggcgaccattttcccgcaatgctcacaagctcctatagcttcccttcttcccccgtacctatcaccagcggtgtcttcggtatgtgaaaacccaattcttcaaccctacaggatccaacaggcaatcgcagctggcatcttacctttatcacccttgttcctccaacaatcatcagccctattacagcagttacctttggtgcatttattggcacaaaacatcatggcacaacaactacaacaacttgtgctagcaaaccttgctgcctactctcagcaacagcagtttctttcattcaaccaactagctgcattgaactctgctttttatttgcaac

SEQ ID NO: 32064 - DNA, 319 bp, Zea mays
  Clone ID: LIB3182-014-P2-M1-B3
cagtgtaggctccatcagatccaacgccaccagctagcagcagcagcagcagcatggccaccaccagcacgcctcgcctcgccaccctcctggtgctcctggcggcggcgtcaccgctgctgagcgcagctcaaaaggccgccccgaaggctccggcggcggcgaatgcggcgccagggccggcggcgtcgacgtcgtccggcgcgggcgcggcggacgcggcccctaccacagacgtaaacaaggcgctcaaggaccaccagttcagcgtgttacagcagctgctgcacgacacgcgcttgggcccgcacatcaacgc

SEQ ID NO: 32065 - DNA, 435 bp, Zea mays
  Clone ID: LIB3182-014-P2-M1-B4
attattgagaccaacaagcaacatataaagtggaatgcagtagcaacaatagagcaacaatggcgaccaagatattttccctccttatgctccttgctctttctgcatgtgttgctaacgcgacaattttccctcaatgctcacaagctcctatagcttcccttcttcccccataccttccatcaatgatagcttcagtatgtgaaaacccagctcttcaaccctataggctccaacaagcaatcgcagcaagcaacatacctttatcacccttgtttcaacaatcgccagccctatctttggtgcagtcattggtacaaaccatcagggcacagcagctgcagcaactcgtgctacctgtgatcaaccaagtagctctggcaaacctttctccctactcttagcaacaacaatttcttccattcaaccaactgt

SEQ ID NO: 32066 - DNA, 320 bp, Zea mays
  Clone ID: LIB3182-014-P2-M1-B6
tagaagatgcccgaggcttgcttaaagctggtattggggatcctgatcctggtattttcttggaaaatgaattgctttatggagaatctttcccagtttctgctgaagggctcgattctagtttttgcctaccgattggcaaagctaagatagaacgtgggggtaaagatgttaccattactgcattctccaagatggttggctatgctctccaggctgcaaagatactgtccaaggaaggaatcagtgctgaggggttcaacccttgatcgatcataccacttgctggagcttgtattgatgcatctttgatgcaaacc

SEQ ID NO: 32067 - DNA, 368 bp, Zea mays
  Clone ID: LIB3182-014-P2-M1-B8
cccccggccccaacctatctagatcgagcggggtggccatcgacagcggcagcacctctcgtcgcttcacttatgtgtacgagcagcacccatatagctctgctagaaacacacatgcagcggccgttaagactgtctccaacaacgctttctttgatcctcaccaaaatggaggaagaggtgcggcaactagccctactgcatgaggaacaagaaaggacacgtacatgacaacggacctaatttatcatggcaatagcaggaatggtgacgaggaaacgatgattgattgaaggacagggggactgcaaaggcatttgtctgctttcaattatcttatatcacacgcacacactcatatatacatt

SEQ ID NO: 32068 - DNA, 309 bp, Zea mays
  Clone ID: LIB3182-014-P2-M1-B9
agaccattagctttatctactgcagagcgcgagaagaacccgatcgacaccatgagggtgttgctcgttgccctcgctctcctggctctcgctgcgagcgccacctccacgcatacaagcggtggctgcggctgccagccaccgccgtcggttcatttaccgtcgccggtgcatttgtcacctccggttcacctgccaccttcggtgcatctcccaccggcggtccacctgtcgtcgtcgtttcacctgccatcgtcggtccatgtgccgtcgccggttcatttggcgtcggcaccatgccactaccct

SEQ ID NO: 32069 - DNA, 405 bp, Zea mays
  Clone ID: LIB3182-014-P2-M1-C1
tgcctgtgcacttctccatcaccaccactgggtcttgagaccattagctttatctactccagagcgcagaagaacccgatcgacaccatgagggtgttgctcgttgccctcgctctcctggctctcgctgcgagcgccaccttcacgcatacaagcggcggctgcggctgccagccaccgccgccggttcatctaccgccgccggtgcatctgccacctacgggtcacctgccaccttcggtgcatcttccaccggcggtccacctgccgtcgccggtccacctgccaccggcggtccatgtgccgtcggcggttcatttgccgtcgacaccatgccactaccctactcaaccgtcccgggcttagccttatcctcaggccaacccatgcccgtgccaacaggcg

SEQ ID NO: 32070 - DNA, 155 bp, Zea mays
  Clone ID: LIB3182-014-P2-M1-C10
ggagccgctgactagctacctagctcgctggtttactcatttagcggcgatgagtaacgtagtgtcacccatcaccatgggtggcagtgtgagcaatgacctgaatgaaccattgaaatggaaaggaataatatataaggaaaaaagatgattgg

SEQ ID NO: 32071 - DNA, 416 bp, Zea mays
  Clone ID: LIB3182-014-P2-M1-C11
tagcaacatacatagtgaagtacagtaggggcatcttagcaccaatggcagccaagatttttgccctccttgccctccttgctctttcagcaagtgttgctaccgcgactattattccacaatgctcacaacaatacctctctccggtgacagccgcgagatttgaatacccaactatacaatcctacaggctacaagaggccatcacagcaagcatcttacggtcgttagcattgactgtccaacaaccatatgccctattgcaacaaccatccttagtgaatctatatctccaaagaatcgcagcacaacaactacaacagcagttgcttccaacaatcaatcaagtagttgcagcgaaccttgctgcttacctccagcaacaacaatttcttccattcaatcaactagctggg

SEQ ID NO: 32072 - DNA, 401 bp, Zea mays
  Clone ID: LIB3182-014-P2-M1-C12
tattttcagcattcagaaacacaccaagcgaagcgcactagcaacaacctaacaacaatggctaccaagatattagccctccttgcgcttcttgcccttttagtgagcgcaacaaatgcgttcattattccacaatgctcacttgctcctagtgccattattccacagttcctcccaccagttacttcaatgggcttcgaacatccagccgtgcaagcctacaggctacaactagcgcttgcggcgagcgtcttacaacaaccaattgcccaattgcaacaacaatccttggcacatctaaacctacaaaccatcgcaacgcaacagcaacaacagtttctgccatcactgagccacctagccgtggtgaaccctgtcgcctacttgcaacagcagctact

SEQ ID NO: 32073 - DNA, 241 bp, Zea mays
  Clone ID: LIB3182-014-P2-M1-C2
agaagatcctcgtcgacaaggaggatgaggaggaggaggacgaagccggcggcggagaggatgacaagaaaaaggttgaatgatcaaagttcttggccaagaaggtagcaatgtcgtgaagcgtacgtgaactggaaacggatggacaagtatatttggagtttgatgtggtgtttccggatcgtgtgtttgtctcagatgaaaaaatctcaatttttttgagttcaagttgtaataattt

SEQ ID NO: 32074 - DNA, 402 bp, Zea mays
  Clone ID: LIB3182-014-P2-M1-C3
tagcaacatagaaagcacaatagtgtaccaacaatggcagctaaaatattttgcctccttatgctccttggtctttctgcaagtgctgctacggcgaccattttcccacaatgctcacaagctcctatagcttcccttcttcccccgtacctctcaccaacggtgtcttcggtatgtgaaaacccaattcttcaaccctacaggatccaacaggcaatcgcagctggcatcttacctttatcacccttggtcctccaacaatcatcagccctattacagcaggtacctttggtgcatttattggcacaaaacatcagggcacaacaactacaacaacttgtgctagcaaaccttgctgcctactctcaacaacagcagtttcttccattcaaccaactagct

SEQ ID NO: 32075 - DNA, 438 bp, Zea mays
  Clone ID: LIB3182-014-P2-M1-C4
ccaacatgcaacaacaagcgcttgcggcgagcgtcttacaacaaccaattgcccaattgcaacaacaatccttgccacatctaacaatataagccatcacaacgcaacagcaacaacagttcctaccagcactgagccacctagccatggtgaaccctgccgcctacttgcaagagcagctgcttgcatccaacccacttgctctggcgaacgtagttgcaaaccagcaacaacaacagctacaacagtttctgccaacgctcagtcaactagccatggtgaaccctgccgcctacgtacaacaacaacaactgctttcatctagcccgctcgctgtgggcaatgcacctacatacctgcaacaacaattgttgcaacagattgtaccagctctgactcaactagctgtggcaaaccctgttgcctacttgcaacagc

SEQ ID NO: 32076 - DNA, 422 bp, Zea mays
  Clone ID: LIB3182-014-P2-M1-C8
aggaagcaagggaatcacatcgccatggcggccaagatgtttgcattgtttgcgctcctagctctttgtgcaaccgccactagtgctacccatatcccagggcacttgtcaccactactgatgccattggctaccatgaacccatggatgcagtactgcatgaagcaacagggggttgccaacttgctagcgtggccgaccctgatgctgcagcaactgttggccttaccgcttcagccgtgccagatgccaatgatgatgccaggtatgatgccaccgatgacaatgatgccgatgccgaatatgatgccatcgatgatggtgccgactatgatgtcaccaataacgatagctagtatgatgccacccgatattgatgccaaacatggtttcaccaatgatgatgccgagtatgatgcctt

SEQ ID NO: 32077 - DNA, 180 bp, Zea mays
  Clone ID: LIB3182-014-P2-M1-C9
gtttttgctgctctcaaatggttgtctggatatttcattagtgcttgttgaagttcccccatttgtttatggtataagcgcttgaataaaatgtttctggaaagtaccggcctacaatctggattttggcaaaataattgaattagttgttgtacaaaaaaaaaaaataataaaataaaa

SEQ ID NO: 32078 - DNA, 422 bp, Zea mays
  Clone ID: LIB3182-014-P2-M1-D1
caactagcaacatagaaagctcaatagtgtgccaacagtggcagccaaaatattttgctttcttatgctccttggtctttctgcaagtgctgctaccgcaaccattttcccacaatgctcacaagctcctatagcttcctttcttcccccatacctttcaccagcggtgtctttagtatgtgaaaacccaattcttcaaccctacaggatccaacaggcaatcgcagtaggcatcttacctttatcacccttgttcctccaacaaccgtcagtcctattacagcagttacctttggtgcatttgttggtacaaaacatcaaggcacaacatctacaacaacttgtgccaggaaaccttgctgtctacttttaagaacaagcagtttttccatttaaccaactggcttgattgaactttggtg

SEQ ID NO: 32079 - DNA, 419 bp, Zea mays
  Clone ID: LIB3182-014-P2-M1-D10
tcgcaaaaacatcagcaacaacaagaagttgaggttcaacaacaacatcatcaattttatctccaacaacatcaacaacatcagcaccaacaacaacatcaatgtgaaggccaacaacaacatcaccaacaatcacaaggccatgtgcaacaacacgaacagagccatgagcaacaccaaggacagagccatgagcaacaacatcaacaacaattccagggtcatgacaagcagcaacaaccacaacagcctcagcaatatcagcagggccaggaaaaatcacaacagcaacaatgtcattgccaggagcagcaacagactacaaggtgcagctataactactatagcagtagctaaaactaataaattgtcatgaattcctaaggcagcagtgcatgcctttggtaatgccttttttc

SEQ ID NO: 32080 - DNA, 123 bp, Zea mays
  Clone ID: LIB3182-014-P2-M1-D2
tcgagaccattagctttatctactccagagcggagaagagggggatcgacaccatgagggtgttgttcgatgccctcgctctcctggctctcgctgtgagcgccacctccacgcatacaagcg

SEQ ID NO: 32081 - DNA, 93 bp, Zea mays
  Clone ID: LIB3182-014-P2-M1-D4
cacacataatcatgcgtggtatgaccaataatatatgcatcataataaagggttgggtttaaagaaatgaaaatataaaaatattaattaaat

SEQ ID NO: 32082 - DNA, 328 bp, Zea mays
  Clone ID: LIB3182-014-P2-M1-D5
gctgatcctggcctgctgctcgctcgtcgctctgtgctacctcggcgcgtgatgatcttgttaggacgagacgccgctccccgctgccgcttgctgttgttggggtgtcttgttccttagcccttttcttttctcctctagtggcagtggcaggcaggagagaaccttgtgatgatgggcgcactgcactgtcttccaccggtggaggagagctgggcagagtgaggcccctgtaaatcttaggttctagggagggagggatgctgtgttgacttcttgtacatgggtgctcattgttttcattatatataatattattctatgtggg

SEQ ID NO: 32083 - DNA, 192 bp, Zea mays
  Clone ID: LIB3182-014-P2-M1-D6
cttcagaccattagctttatctactccagagcgcaaaagaacccgatcgacaccatgagtgtgttgctcgttgccctcgctctcctggctctcgctgtgagcgccaccttcacgcatacaagcggcggctgcggctgccaaccaccgccgtcggttcatctaccgtcgccggtgcatctgtcaccttcgttt

SEQ ID NO: 32084 - DNA, 400 bp, Zea mays
  Clone ID: LIB3182-014-P2-M1-D7
gaccttgtctgtggcccccctgaacctctgcatcgacggcctcgagagaagagtcgccggctcgccgccctgctccggcaccagcaaaaccgccaggtgatccccgacaaccagctagagcagctagccgctgcagcagaagggaccttcttatcgccgtggttatcccatcatggctgagacaaatgatgccagcccttcgtcgaaactccatacaagattgagactctgggagtttcctgactgttatgtatttgaaccaattgatggccttgctgacttgtacctatcagttagccggaccagcggaacaatgaatctagttcaagacttgcccataccggggatccactacaaaacataaagttcaaacagtatatggggtgataggagtactcaa

SEQ ID NO: 32085 - DNA, 422 bp, Zea mays
  Clone ID: LIB3182-014-P2-M1-D8
tcgcaactagcaacatagaaagcacaatagtgtaccaacaatggcagctaaaatattttgcctccttatgctccttggtctttctgcaagtgctgctacggcgaccattttcccacaatgctcacaagctcctatagcttcccttcttcccccgtacctctcaccaacggtgtcttcggtatgtgaaaacccaattcttcaaccctacaggatccaacaggcaatcgcagctggcatcttacctttatcacccttgttcctccaacaacaacaactactctcagcaacagcagtttcttccattcaaccaactagctgcattgaactctgctttttatttgcaacaacaacaactaccattcagccagctatctgctgcctacccccagcaatttctttcattcaaccaactgacaacattg

SEQ ID NO: 32086 - DNA, 315 bp, Zea mays
  Clone ID: LIB3182-014-P2-M1-E12
gggaaatctcctctatccatccctctctatctatatatgtaataatgcagtaagacgacacacattatcatgtgtggtatgaccaataatatatgcatcataataaagttttggttttaaaaaaaaaaaaaaaaaaaaaaaaaaaaaataaaaaaaaaaaaaaaaaaaaaaaaaaaaaaaaaaaaaaaaaataaaaaaaaaaaaaaataaaaaaaaaaaataattaaaaaaaatttattaagggggggcgcttttaagggatccaaatttattttcctgggtctggggagttttatatttttttttggtttccca

SEQ ID NO: 32087 - DNA, 385 bp, Zea mays
  Clone ID: LIB3182-014-P2-M1-E3
ggcacaacaactacaacaactcgtgctagcaaaccttgctgcctactctcagcaacaacagtttctgccattcaaccaactagctgcattgaactctgctgcttatttgcagcaacaacaactactaccattcagccagctagctgctgcctacccccggcaatttcttccattcaaccaactggcagcattgaactctcatgcttatgtacaacaacaacaactactaccattcagccagctagctgctgtgagccctgctgccttcttgacacagcaacatttgttgccgttctacctgcacactgcgcctaacgttggcaccctttacaactgcaacaattgctgtcattcgaccaacttgctttgacaaacccagcagtgt

SEQ ID NO: 32088 - DNA, 415 bp, Zea mays
  Clone ID: LIB3182-014-P2-M1-E4
gtgacatggccttctaccagaagctaggggagggcgccaacatgtcggtcgacagcctcaacagcatgcagaccagcatgcatggggggtccatcgccatgtctgtggacaacaacagcagcgttggctctaacagtgactcccgcactggcatgcttggtcatcctggtctcaaggggcctgccattgtgggaagctactcggttgggcacagcatcttccgccctggccgggtgtcccacgccttgagtgaggatgcgctggcacatgctctgatggacaataagttcccaactgagacactcaaggattatgaggagtggactattgatctggggaagctccacttgggaatgccctttgcacaaagtgcctttgtgaagctctacaggggaacatacaattgggatggatg

SEQ ID NO: 32089 - DNA, 175 bp, Zea mays
  Clone ID: LIB3182-014-P2-M1-E8
gcggcgatgattgagtaatagtgtgtcacgcatcaccatgggtggcagtgtcagtgtgagcaatgacctgaatgaacatttgtaatgtattgaaaaaatattaaaaaaattataatatatataattatataatttattacaatatttattggttggccttttataggatcaaagt

SEQ ID NO: 32090 - DNA, 322 bp, Zea mays
  Clone ID: LIB3182-014-P2-M1-E9
cgatcagctcgcttcgtgactggtctctggtctcgatcgattgcttcctccaccgaggcgggggaaagcgccgcccagatcgccgtaggcaagcggcgatcactccagctttgagcataagtttctgcagggaggctcgtgaagtcagtagtcgtatctggcagtggcagcacagcgcaccatggaatggctgagctggagaacggtgtgttgtttatcagtgctgtgcaccgtgctgttcttgcgcccggtcgagggcattcgctttgtgatcgatagagaagagtgcttttcgcatatcggggagcatgagggggattct

SEQ ID NO: 32091 - DNA, 406 bp, Zea mays
  Clone ID: LIB3182-014-P2-M1-F1
tccagatcagcaaagcggcagtgcgtagagaggatcggcgaacagaacagcatgaagatggtcatcgttctcgtcgtgtgcctggctctgtcagctgccagcgcctctgcaatgcagatgccctgcccctgcgcggggctgcagggcttgtacggcgctggcgccggcctgacgacgatgatgggcgccggcgggctgtacccctacgcggagtacctgaggcagccgcagtgcagcccgctggcggcggcgccctactacgccgggtgtgggcagacgagcgccatgtaccagccgctccggcaacagtgctgccagcagcagatgaggatgatggacgtgcagtccgtcgcgcagcagctgcagatgatgattcagcttgagcgtgccgctgacgccagcaaca

SEQ ID NO: 32092 - DNA, 423 bp, Zea mays
  Clone ID: LIB3182-014-P2-M1-F10
tcgaccaacacggcccccttcgcgcagcggtgggcatagacgctggactactacacggccatcttctagtccatcgacctggcgctgccgagggacgacagggagcggatcaacatcgagcagcactgcctggcccgggagatcgtgaacctggtggcctgcgagggcgaggagcgggtggagcggcacgaggtgttcggcaagtggaaggcgcggctgatgatggccgggttcagcccgtccccgctcagcgcgctggtgaacgccaccatcaagacgctgctgcagagctactcgccggactacaagctcgccgagagggacggcgagctctacctcggctggaagaacaggcccctgatcgtctcatcggcatgggactagtggtgacttcaaagaatgttgacctgatggagaatgttt

SEQ ID NO: 32093 - DNA, 423 bp, Zea mays
  Clone ID: LIB3182-014-P2-M1-F11
tccgactccgccgactcgcctgaaccctagccagccgccgccatgccgccgcgacgcggtaggggaaagggtaagggtagggcaaagccaagagcgaagcccaccgagcccgagcccgagtccgatcccgaactagacgaagccgccaagtccgaaatcgaggcgggggacgcggaggctggggaggagtccagcgccgagagcgaggactcgaaggaagacgaatcggagagcgacaccgagtccatggatgcagaggccagcgaagaagctggcgagaacggaacggaggagatggatgcagagcctgaagccaaagccgtcgaggccatagctgtaacggtggccacggaggcggaggcgaatcctgacgcctcggatgaagaagctggtgagactggctcataccgcgaagcagatggc

SEQ ID NO: 32094 - DNA, 402 bp, Zea mays
  Clone ID: LIB3182-014-P2-M1-F12
cagtgatcagccaagtagctctggcaaagctttctccctactctcagcaacaacaatttcttccattcaaccaactgtctacactgaaccctgctgcttatttgcagcaacaacaactactaccattcagccagctagctactgcctactctcagcagcaacaatttcttccatttaaccaattcgccgcactgaacccctctgcttatttccagcagcaaatactactaccatttggccagctagctacaacaagccccgcttccttcttgacacaacaacaattgcttccgttctaccagcagtttgtggctaaccccgcaacccttttacaactgcaacagttgctgccctttgtccaacttgctttgacaaacccagcaggcttctaccaacaacaca

SEQ ID NO: 32095 - DNA, 181 bp, Zea mays
  Clone ID: LIB3182-014-P2-M1-F2
tcggacgactcaaggaggtttgcaagccgccaggcaatgaggctaatcttcgcaccaatgccattggtagccaatttagtccacggtttgtggccaaaattttggttggaaagaacgtcttttttaatcttcttaacaagttgactgttgatatttgacccttgaaattcctttgatttgg

SEQ ID NO: 32096 - DNA, 318 bp, Zea mays
  Clone ID: LIB3182-014-P2-M1-F3
gcaaagcggcagtgcgtagagaggatcggcgaacagaacagcatgaagatggtcatcgttctcgtcgtgtgcctggctctgtcagctgccagcgcctctgcaatgcagatgccctgcccctgcgcggggctgcagggcttgtacggcgctggcgccggcctgacgacgatgatgggcgccggcgggctgtacccctacgcggagtacctgaggcagccgcagtgcagcccgctggcggcggcgccctactacgccgggtgtgggcagacgagcgccatgtaccagccgctccggcaacagtgctgccagcagcagatg

SEQ ID NO: 32097 - DNA, 420 bp, Zea mays
  Clone ID: LIB3182-014-P2-M1-F4
ttggaagcaagggaatcacatcgccatggcagccaagatgtttgcattgtttgcgctcctagctctttgtgcaaccgccactagtgctacccatattccagggcacttgtcaccactactgatgccattggctaccatgaacccatggatgcagtactgcatgaagcaacagggggttgccaacttgctagcgtggccgaccctgatgctgcagcaactgttggccttaccgcttcagccgtgccagatgccaatgatgatgccaggtatgatgccaccgatgtcaatgatgccgatgccgaatatgatgccatcgatgatgggggcgactattatggtaccaataacgatagctatcatgatggcaccgatgatgatgccaaacatggtttcaccaatgatgatgccgagtatgatgcc

SEQ ID NO: 32098 - DNA, 338 bp, Zea mays
  Clone ID: LIB3182-014-P2-M1-F5
ccgatcgatcgccacagccaacaccacccgccgaggcgacgcgacagccgccaggaggaaggaataaactcactgccagccagtgaagggggagaagtgtactgctccgtcgaccagtgcgcgcaccgcccggcagggctgctcatctcgtcgacgaccagtggattaatcggcatggcggctctggccacgtcgcagctcgtcgcaacgcccgccggcctgggcgtcccggacgcgtccacgttccgccgcggcgccgtgcagggcctgaggggggcccggtcgtctgttgtggtggacacgcttagcatgctgaccagcgcgcgcgcggcgcccat

SEQ ID NO: 32099 - DNA, 197 bp, Zea mays
  Clone ID: LIB3182-014-P2-M1-F6
ttattaatctagagcagcccatctacatggtccagggttactttctattgcttgcgatcctatatcttttttctaccgtcacttaaactaactttatttgacggcacttttcatcactactgctgtcataaccttccatttacccaacttttcagtactgtattacataccatatgtttcccttttcgttatttcga

SEQ ID NO: 32100 - DNA, 382 bp, Zea mays
  Clone ID: LIB3182-014-P2-M1-G10
atccaatccagatcagcaaagcggcagtgcgtagagaggatcgtcgaacagaacagcatgaagatggtcatcgttctcgtcgtgtgcctggctctgtcagctgccagcgcctctgcaatgcagatgccctgcccctgcgcggggctgcagggcttgtacggcgctggcgccggcctgacgacgatgatgggcgccggcgggctgtacccctacgcggagtacctgaggcagccgcagtgcagcccgctggcggcggcgccctactacgccgggtgtgggcagacgagcgccatgtaccaaccgctccggcaacagtgctggcagcagcaaatgatgatgatggacgtgcagtccgtcgcgcagcaactgcagatgatgatgc

SEQ ID NO: 32101 - DNA, 420 bp, Zea mays
  Clone ID: LIB3182-014-P2-M1-G11
gccgccaccaggtgcagagactgtcgggatctcttctcctgcgaagaacccccattcgcccaccagatcacttgttaaactttgttgaggggtgatggcggttcctttcgcaaacctcaacaccgtggcagggcttaaaaagcttgatgagtaccttctcactcgcagctacatcactggctaccaagcttccaaggatgactcggctgtctacactctgttttcgcctgctccctcgtccaagtgtatcaacgcagcaaggtggtttaatcacattgatgcgctcgtgaggctgagcggaattactgcagagggccaaggtgtgaaggttgaatcctcagcagttccttcagccccaacttcagatgttgctgaagcacaagccccacctgttgaggaggaggacgatgatgattgttg

SEQ ID NO: 32102 - DNA, 422 bp, Zea mays
  Clone ID: LIB3182-014-P2-M1-G3
actagcgcttgcggcgagcgtcttacaacaaccaattgcccaattgcaacaacaatccttggcacatctaaacctacaaaccatcgcaacgcaacagcaacaacagtttctgccatcactgagccacctagccgtggtgaaccctgtcgcctacttgcaacagcagctacttgcatccaacccacttgctctggcgaacgtagctgcataccagcaacaacaacgtctgcaacagtttatgccagcgctcagtcaactagccatggtgaaccctgtcgcctacctacaacagcaacaattgctttcatctagcccgctcgctgtgggcaatgcacctacgtacctacaacaacagttgctgcaacagattgtaccagctctgactcaactagctgtgggaaaccctactgctacttgcaaca

SEQ ID NO: 32103 - DNA, 404 bp, Zea mays
  Clone ID: LIB3182-014-P2-M1-G4
gtttttccatatgaaaataatttagacagggagtgggaagtcatggagtccccgccaataactgagttgaactcactgccaaaatcaaagggtcggtccaagaatttcagtgaagatgaagatatcttattggtttcagcatatctcaatataagtaaagatgctattgttggaagagatcaaaaagagggtaggttttgggaaataattgagaattactttcatgacaacaagacattttagacagatcgcaacgcatcatcgttgtagcatcgatgggcttttattcataaagaggttatgtgtatttcaagcataccatgatgccatataaagaaagaatgtaagtgggaagacaagtgtcgacaagctgcctgtagcgatagcaactttttatgatctgc

SEQ ID NO: 32104 - DNA, 397 bp, Zea mays
  Clone ID: LIB3182-014-P2-M1-G5
attttcagcattcagaaacacaccaagcgaagcgcgactagcaacaacctaacaacaatggctaccaagatattagccctccttgcgcttcttgcccttttagtgagcgcaacaaatgcgttcattattccacagtgctcacttgctcctagtgccattattccacagttcctcccaccagttacttcaatgggcttcgaacatccagccgtgcaagcctacaggctacaactagcgcttgcggcgagcgttttacaacaaccaattgcccaattgcaacaacaattcttggcacatgttaacctacaaaccattgcaacgcaacaagaacaacagtttctgccattactgagccacctagccgtggtgaaccctgtcgtctacttggcacagcagc

SEQ ID NO: 32105 - DNA, 351 bp, Zea mays
  Clone ID: LIB3182-014-P2-M1-G6
caagatcattgcatttgcatgggaacctaaaggacatcgctttgctatcatccatggtgatggccctaagcctgatgttagcttctacaccatgcgaacagccaataacactagccgtgtatccaagctcacaaccctcaaggccaagcaagctaatactctgtactggtctcctgctgggcgcttcatagttcttgctggactgaagggtttcaacgggcagctggaattctacaatgttgatgaactagagacaatggcaacaggagagcattttatggcaacagatatcatgtgggatccaactgggagatattttgcgactgcagttacctcagttcatgaaatgga

SEQ ID NO: 32106 - DNA, 347 bp, Zea mays
  Clone ID: LIB3182-014-P2-M1-G7
ggagccgcagcaccggtaccaggcgatcttcggcttggtcctccagtccatcctgcagcagcagccgcaaagcggccaggtcgcggggctgttggcggcgcagatagcgcagcaactgacggcgatgtgcggcctgcagcagccgactccatgcccctacgctgctgccggcggtgtcccccactgaagaaactatgtgctgtagtatagccgctggctagctagctagttgagtcatttagcggcgatgattgagtaataatgtgtcacgcatcaccatgggtggcagtgtcagtgtgagcaatgacctgaatgaacaattgaaatgaaaagaaaaaagttttgtt

SEQ ID NO: 32107 - DNA, 428 bp, Zea mays
  Clone ID: LIB3182-014-P2-M1-G9
tgagcattcagaaacacaccaagcgaagcacattagcaacaacctaacaacaatggctaccaagatattatccctccttgcgcttcttgcgctttttgcgagcgcaacaaatgcgttcattattccacaatgctcacttgctccaagttccattattacacagttcctcccaccagttacttcaatgggcttcgaacacccagctgtgcaagcctataggctacaacaagcaattgcggcgagcgtcttacaacaaccaatttcccagttgcaacaacaatccttggcacatctaacaatacaaaccatcgcaacgcaacagcaacaacaatttctaccagcactgagccacctagccatggtgaaccctgccggctacttgcaacagcagttgcttgcatcaaacccacttgctctggcaaacgtag

SEQ ID NO: 32108 - DNA, 278 bp, Zea mays
  Clone ID: LIB3182-014-P2-M1-H1
ctctggtctctgacatgcagcaattattgcaggtgcatttgatccgtcccggccgcctacacgatgtccaagtcgggagcgctggatcttgcttctggcctcggagggaagatcaacaaggtggaagtcaagtcggccgtcgatgagtatgagaaatatcatggatactatggagggaaggaggaagcatggaagtccaactatactgatatggttaataaatactatgatcttggcacttgcttttattgagatggttggggtgaattctttcactt

SEQ ID NO: 32109 - DNA, 420 bp, Zea mays
  Clone ID: LIB3182-014-P2-M1-H10
gagaccaacagcacatagaggtggagtgcagtagcaacaatagagcaacaatggcgaccaagatattttccctccttatgctccttgctctttctgcatgtgttgctaacgcgacaattttccctcaatgctcacaagctcctatagcttcccttctttccccataccttccatcaatgatagcttcagtatgtgaaaacccaactcttcaaccctataggctccaacaagcaatcgcagcaagcaacatacctttatcacccttgtttcaacaatcgtcagccctatctttggtgcaggcattggtacaaaccatcagggcacagcagctgcagcaacttcgtgctacctgtgatcaaccaagtagctctggcaaaccttttttcctactcttaggaacaaacaattttttcatttaac

SEQ ID NO: 32110 - DNA, 399 bp, Zea mays
  Clone ID: LIB3182-014-P2-M1-H11
ctctacgagcgcatcctctacgagtccaagaagaaggaccgcaagaactcgtgcggcctgctcaaggagatccaccagattgagctctgctccaggcatctcatggagatcactgacgccgccgacttcccgttgcgcgaggacaaggacgccgtcttgcgggaggccgcgcaggacctagtgcacctgtgcgaattcatcaaggaagggctcgacccgctcgagcgccaggtcagagagatgttccacaggattgtgcgcacccgcacagaaatccttgactgcttgagtaagccacatggcaccgggtgatgggatataggagattgccagcccgtttgcttgctgtgatgccccttaaccaaacattcttggtgaatgcaacagcggtggtcaaat

SEQ ID NO: 32111 - DNA, 384 bp, Zea mays
  Clone ID: LIB3182-014-P2-M1-H2
ccagactgcagctcgtgctgcacctgcaatccatcatgctgtaaaccaagctgcaactcgtgctgcagaccaaactgtggctcctgctgcagaccaaactgtagctcgtgctgcaatctgtcatgctgcaaacccaactgtagctcatgctgtaaagcgaactgcagttcatgctgtaaacccaattgcagctgcttcaaggccctctcgtgctgcaaattccagtgcagcccaaactgctgcacttgcagtctcccgagctgctcaagctgcaacccctgcggcagttgcaagcaatgctgctcatgccccaccgactgctgtgattgcaagccaagctgcggctgtttcggagcgcaatgctgcaaatgcgtgggatgctgc

SEQ ID NO: 32112 - DNA, 73 bp, Zea mays
  Clone ID: LIB3182-014-P2-M1-H3
tgggtacaatcaattgcattctattatatatattttctatagtgtcacctaaatttaattcaatggtctttta

SEQ ID NO: 32113 - DNA, 432 bp, Zea mays
  Clone ID: LIB3182-014-P2-M1-H4
gtaaaaaaggaaaggaagaactcccttctctcctgtgcgatcccgacgaacgccgagggccgcggcgatggaatactcaggcggcggtgcgacgctgtcggagatgtaccagagcgcgcggcggctgctactctcggcgcgggatggcgtgggccgcgtcgagcgccttgcctcggcacccacttcgtcctcctactcctcggcgccgctcgtcggtggtgcgtcgggggaccccgcggctgctgaggaggtgcggctagaggtggcgcaaatccaggggctgtgcgcgcagatggaccgactctggcgatccattcccgccaaaggccaacgggacctctggaagagaaaagtggagcagctctctggagagggggattcattgaaagtaacccttggcaggcattttttgggacagaaaaaacggtttct

SEQ ID NO: 32114 - DNA, 342 bp, Zea mays
  Clone ID: LIB3182-014-P2-M1-H5
caactagcaacatagaaagcacaatagtggaccaacaatggcagccaaaatattttgcctccttatgctccttggtatttctgcaagtgctgctacggcgaccattttcccgaaatgctcgcaagctcctatagcttcccttcttcccccgtacctctcaccagcggtgtcttcggtatgggaaaacccaattcttgcaccctacaggatgcaagaggcgatcacatctggcgtcttacctttatgacccttgttcctccaacaatcatcagccctattacatcagttacctttggtgcatttattggcacaaaacatcaaggcacaacaactacaacaact

SEQ ID NO: 32115 - DNA, 173 bp, Zea mays
  Clone ID: LIB3182-014-P2-M1-H6
agaccattagctttatctactccagagcgcagaagaacccgatcgacaccatgagggtgttgctcgttgccctcgctctcctggctctcgctgcgagcgccacctccacgcatacaagcggcgggtgctgctgccagccaccgtcgtcggttcatcttccgcctccggtgcat

SEQ ID NO: 32116 - DNA, 251 bp, Zea mays
  Clone ID: LIB3182-014-P2-M1-H7
caactagcaacatagaaagcacaatagtgtaccaacaatggcagccaaaatattttgctttccttatgctccttggtctttctgcaagggttgctaccgcaaccattttccaacaatgctcacaagctcctatagtttcccttcttcccccatacctttaaccagcggggtcttcaatgtgtgaaaacccaattgttcaaccttacaggatccaccaggcattcgcaccaggcattttaccattttaaccc

SEQ ID NO: 32117 - DNA, 227 bp, Zea mays
  Clone ID: LIB3182-015-P2-M1-A10
cttgaagttggtctgaccaactatgcagctgcctactgcactggccttctgttggctcgccgtgtgctcaagacccgtggtttagataaggaatatgagggcaatgttgaggccactggtgaggatttctctgttgagccagctgatgagaggaggccttttcgcgctctattggatgtatgcctttttattattacaacatgttaaccgttttctttgtttttata

SEQ ID NO: 32118 - DNA, 56 bp, Zea mays
  Clone ID: LIB3182-015-P2-M1-A11
ttatctttgtttacttatttatttttatatttttcttcatctttcctttctatcta

SEQ ID NO: 32119 - DNA, 59 bp, Zea mays
  Clone ID: LIB3182-015-P2-M1-A12
gttatagataacgtgcaacctcctgtggggatatactcttcctaactcttttacgctat

SEQ ID NO: 32120 - DNA, 318 bp, Zea mays
  Clone ID: LIB3182-015-P2-M1-A2
ggttgactcattcttggttgaagaggaactgaatagtgactacctatatggtgacggttcttccaggagtgctgattctaggaagcattttccaaataaagttgcttccacccaaaaggcatctgttggacctatccataagctacctcaaggactgataggtcccgctattggaatcggacggattccaccaaaaaatctttttcaacagactgtccccagtttcgttgacgtaagaaaagaaaatacaaagccttcacctggactcagtagagcgactgcaagagttcagcaaaagtcttttgctcgtagcaagag

SEQ ID NO: 32121 - DNA, 197 bp, Zea mays
  Clone ID: LIB3182-015-P2-M1-A3
cccgtcgcatcccatcccactaccacccatctcgtcgtccgccgattcgatccggttcttccaacccaggggcagtgatggcgacgaagaggagcgtgggcaccctcggcgaggcggatctgaaggggaagaaggtgttcgtgcgcgccgacctcaacgttccgctcgacgatgcccagaatatcaccgaggacacc

SEQ ID NO: 32122 - DNA, 424 bp, Zea mays
  Clone ID: LIB3182-015-P2-M1-A4
tgagcattcagaaacacaccaagcgaagcgcactagcaacgacctaacaacaatggctaccaagatattagccctccttgcgcttcttgccctttttgtgagcgcaacaaatgcgttcattattccacaatgctcacttgctcctagtgccattattccacagttcctcccaccagttacttcaatgggcttcgaacacctagctgtgcaagccaacatgcaacaacaagcgcttgcggcgagcgtcttacaacaaccaattgcccaattgcaacaacaatccttgccacatctaacaatacaagccatcacaacgcaacagcaacaacagttcctaccagcactgagccacctagccatggtgaaccctgccgcctacttgcaagagcagctgcttgcattcaacccactttgtttggcgaac

SEQ ID NO: 32123 - DNA, 339 bp, Zea mays
  Clone ID: LIB3182-015-P2-M1-A7
caattagctcatcgactccagattggagaactcgacaccatgaaggtgctgatcgttgcccttgctctcctggcgctcgctgcgagcgccgcctccagtacaagcggcggctgtggctgccagacaccaccgtttcatctaccgccttcgttctatatgccgcctccgttctatctgccgccgcaacagcagccgcagccatggcaataccccactcaaccaccgcagctaagcccgtgccagcagttcggatcctgcggcgtcggcagcgtcggcagcccgttcctgggccagtgcgtcgagttcctgaggcaccaatgcagcccggcgggacgccct

SEQ ID NO: 32124 - DNA, 330 bp, Zea mays
  Clone ID: LIB3182-015-P2-M1-A8
attgagaccaacaagcaacatagaaagtggaatccagcagcaacaatagagcaacaatggcgaccaagatattttccctccttatgctccttgctctttctccatgtgttgctaacgcgacaattttccctcaatgctcacaagctcctatagcttcccttcttcccccataccttccatcaatgatagcttcagtatgtgaaaacccagctcttcaaccctataggctccaacaagcaatcgcagcaagcaacatacctttatcacccttgtttcaacaatcgccagccctatctttggggcagtcaatggtacaaaccatcagggcac

SEQ ID NO: 32125 - DNA, 95 bp, Zea mays
  Clone ID: LIB3182-015-P2-M1-A9
cactcttagtttaccagtaaaatttgtcatttcatttttgtactatttttttgttttttttaattattttctttgcacttctttctttttcctct

SEQ ID NO: 32126 - DNA, 164 bp, Zea mays
  Clone ID: LIB3182-015-P2-M1-B1
aacaagcaacatagaaagtggaatccagtagcaacaatagagcaacaatggcgaccaagatattttccctccttatgctccttgctctttctgcatgtgttgctaacgcgacaattttccctcaatgctcacaagctcctatagcttccttttttcccccatac

SEQ ID NO: 32127 - DNA, 321 bp, Zea mays
  Clone ID: LIB3182-015-P2-M1-B10
gcacaacaactacaacaacttgtgctaggaaaccttgctgcctactctcagcaacagcagtttcttccattcaaccaactggctgcattgaactctgctgcttatttgcaacaacaactaccattcagtcagctagctgctgcctacccccagcaatttcttccattcaaccaactggcagcattgaactctgctgcttatttacaacagcaacagctaccaccattcagccagctagctgatgtgagccctgttgccttcttgacacaacaacatgtgttgccggtctacctgcccgctgcgccttacgctggcacccct

SEQ ID NO: 32128 - DNA, 401 bp, Zea mays
  Clone ID: LIB3182-015-P2-M1-B12
tagcaacatagaaagcacaatagtgtaccaacaatggcagccaaaatattttgcttccttatgctccttggtctttctgcaagtgttgctaccgcaaccattttcccacaatgctcacaagctcctatagcttcccttcttcccccatacctctcaccagcggtgtcttcaatgtgtgaaaacccaattgttcaaccctacaggatccaacaggcaatcgcaacaggcatcttaccattatcacccttgttcctccaacaaccgtcagccctattacagcagttacctttggtccatatggtggcacaaaacatttgggcacatcaactactacaacttgtgctagcacaccttgctgcatactctcagcaacattcagttcttccattcaaccaactggc

SEQ ID NO: 32129 - DNA, 346 bp, Zea mays
  Clone ID: LIB3182-015-P2-M1-B3
agcaacatagaaagcacaatagtgtaccaacaatggcagccaaaatattttgcttccttatgctccttggtctttctgcaagtgttgctaccgcaaccattttcccacaatgctcacaagctcctatagcttcccttcttcccccatacctctcaccagcggtgtcttcaatgtgtgaaaacccaattgttcaaccctacaggatccaacaggcaatcgcaacaggcatcttaccattatcacccttgttcctccaacaaccgtcagccctattacagcagttacctttggtccatttggtggcacaaaacatcagggcacaacaactacaacaacttgtgctagc

SEQ ID NO: 32130 - DNA, 59 bp, Zea mays
  Clone ID: LIB3182-015-P2-M1-B4
agcatgcaactttattattgtgctatagagacacataaaactaatcgactggtcgcagc

SEQ ID NO: 32131 - DNA, 71 bp, Zea mays
  Clone ID: LIB3182-015-P2-M1-B5
tcgcacagccaacaccacccggctaggggacgcgacagctgtcaggaggaaggaatatctactgccagtca

SEQ ID NO: 32132 - DNA, 324 bp, Zea mays
  Clone ID: LIB3182-015-P2-M1-B6
ggcattggctggtcttgcttgagtttcgatgttgtgcgcgatcaacttggactcgtccgatcagagttccctcatacattatatggtgttgctgggacgcaggcggagaaagcttcattgaattatatcggtgttttcaagctttctaacataaatgggaaaaagcgggaacctataccagcttcagcagttgatggtgacactgatgtggatagtgacagcagcagtgatgaagaagatgaagaaattaacgaggatgcaaagcccattctatcatctaaaaaggtgtcttatgctgtgtgtgttaattgttttctcttattt

SEQ ID NO: 32133 - DNA, 68 bp, Zea mays
  Clone ID: LIB3182-015-P2-M1-B8
ggcatactggggattctatactcagtgctgataactgcagcgattactgatgcaatcaagtgatggtg

SEQ ID NO: 32134 - DNA, 125 bp, Zea mays
  Clone ID: LIB3182-015-P2-M1-B9
attgagaccaactagcaacatagaaggcacaatagtgtaccaacattggcatgctaaaatatttagtcttcttatgcttcttggtctttatgcttgatttgtttcggtgatctatttttcttaca

SEQ ID NO: 32135 - DNA, 167 bp, Zea mays
  Clone ID: LIB3182-015-P2-M1-C10
atgcaacgatatagctcttctattgtgtaacctatatttttgtgagcgcaacaaatgcgttcattattccacaacgcttacttgtttctagtgccaatattctacagttactctcatatctatttaatttggttctgaacatctagctatttatgctatcatgcact

SEQ ID NO: 32136 - DNA, 95 bp, Zea mays
  Clone ID: LIB3182-015-P2-M1-C11
acccaactatttacccttcttatggtgctagctaattctgattctcttgctcacgctacacatcgtcttaatgtttatatgcttttatagatttc

SEQ ID NO: 32137 - DNA, 290 bp, Zea mays
  Clone ID: LIB3182-015-P2-M1-C12
gcaacatagaaagtggaatacagtagcaacaatagagcaacaatggcggccaagatattttccatccttatgctccttgctctttctgcatgtgatgctaacgcgaccatttttcctcaatactcacaagctcctatagctgccctacttcccccataccttccatcaatgaccgcttcattatgtgaaatacctagcccttcaaccttacaggcttccaacatgctattacaaacacgtatcttacctttatcacccttagtctatcaacaattgcctgccctattttt

SEQ ID NO: 32138 - DNA, 183 bp, Zea mays
  Clone ID: LIB3182-015-P2-M1-C2
tcggtgagaaataagatagggttccaatgccctttttccaccggccaccacttgtcaagcgaaagcggtgagtgatggattgtagtgttttaaatttcctgtccctattccttatatgattgtcattttttatttttaatataattctattatatatttttattcttaatttttcctttttca

SEQ ID NO: 32139 - DNA, 116 bp, Zea mays
  Clone ID: LIB3182-015-P2-M1-C3
gttttactatactctaagaagcaaggacaccaccgacatggcagtcatagatgcttgcatagttcgctctcctagctctttgagcaagcgccactagtgcgacccatattccaggg

SEQ ID NO: 32140 - DNA, 315 bp, Zea mays
  Clone ID: LIB3182-015-P2-M1-C4
aatattttgagcattcagaaacacaccaagcgaagcacattagcaacaacctaacaacaatggctaccaagatattatccctccttgcgcttcttgcgctttttgcgagcgcaacaaatgcgttcattattccacaatgctcacttgctccaagttccattattacacagttcctcccaccagttacttcaatgggcttcgaacacccagctgtgcaagcctataggctacaacaagcaattgcggcgagcgtcttacaacaaccaatttcccagttgcaacaacaattctttggacatctaacaatacaaacca

SEQ ID NO: 32141 - DNA, 299 bp, Zea mays
  Clone ID: LIB3182-015-P2-M1-C5
attttgagcattcagaaacacaccaagcgaagcgcactagcaacgacctaacaacaatggctaccaagatattagccctccttgcgcttcttgccctttttgtgagcgcaacaaatgcgttcattattccacaatgctcacttgctcctagtgtcattatttctcagattctcccaccagtaacttcaatgggcttagaacacctagctgagcaagccaacatgcatcaacaagtgcttgcggcgagcgtcttacaacaaccaattgcccaattgcaacaacaattcttgccacatcta

SEQ ID NO: 32142 - DNA, 137 bp, Zea mays
  Clone ID: LIB3182-015-P2-M1-D1
gcgcagcaatggcggcggcaatagtactctccggccaggtgcggccgcttccctcgtcgctgcccctgtccctgctgctgctcctcctcctgtgctgctccggcacctcgtggggatggagcacgttccggagagga

SEQ ID NO: 32143 - DNA, 308 bp, Zea mays
  Clone ID: LIB3182-015-P2-M1-D12
tagaaacacacacctagcgaagcgcactagcaacgacctaacaacaatggctaccaagatattagcccttcttgcgcttcttgccctttttgtgagcgcaacaaatgcgttcattatttcacaatgctcacttgcttctagtgccattattccacaattcctcccaccagttacttcaatgggcttcgaacacccagctgtgcatgcctacaggttacatcaagcgcattacaacaaccaattgcccaattacagtaacaatccttggcacatctaacattacaaaccattgcaacgcaacagcaaca

SEQ ID NO: 32144 - DNA, 184 bp, Zea mays
  Clone ID: LIB3182-015-P2-M1-D2
gtcttcagaccattagctttatctactccagagcgcagaagaacccgatcgacaccatgagggtgttgctcgttgccctcgctctcctggctctcgctgcgagcgccacctccacgcatacaagcggcggttgcggctgccagccaccgtcgtcggttcatttaccgtcgccggtgcttctgcc

SEQ ID NO: 32145 - DNA, 307 bp, Zea mays
  Clone ID: LIB3182-015-P2-M1-D3
gattggcttcgaaactggtgagcaactgcggcactcagaaacaatggagaccaaaatattttccctccttatgctccttgctctttctgcatgtgttgctaacgcgacaattttccctcaatgctcacaagctcctatagcttcccttcttcccccataccttccatcaatgatagcttcagtatgtgaaaacccatctcttcaaccctataggcttcaacaagcaatctcagcaagcaacatacctttatcacccttgtttcaacattcctctgccctatctttggtgcagtcattggtacaaacc

SEQ ID NO: 32146 - DNA, 233 bp, Zea mays
  Clone ID: LIB3182-015-P2-M1-D8
attgataccaactagcaacatacatagtgaagtacagtagcaacatcttagcaccaatggcagtcaagatttttgccctccttgccctccttgctctttcagcaagtgttgctaccgtgactattattccacattgctcacaacaatacctctctccggtgacagccgtgagatttgaatacccaactatacattcctacaggctatctgtggccttcacagcaagcatctta

SEQ ID NO: 32147 - DNA, 239 bp, Zea mays
  Clone ID: LIB3182-015-P2-M1-E2
aagcacaatagtgtaccaacaatggcagccaaaatattttgcttccttatgctccttggtctttctgcaagtgttgctaccgcaaccattttcccacaatgctcacaagctcctatagcttcccttcttcccccatacctctcaccagcggtgtcttcaatgtgtgaaaacccaattgttcaaccctactagtatcatcttgctattttttcatgcatcttaccattatcacccttttt

SEQ ID NO: 32148 - DNA, 73 bp, Zea mays
  Clone ID: LIB3182-015-P2-M1-F1
tgtacatgaaaaaggagctggaggtggagaagttttttacgcatagtgttctgtttttcgtatattaatttgc

SEQ ID NO: 32149 - DNA, 353 bp, Zea mays
  Clone ID: LIB3182-015-P2-M1-F12
atttagaccaactagcaacatagaaagcacaatagtgtaccaacaatggcagccaaaatattttgcctccttatgctccttggtatttctgcaagtgctgctacggcgaccattttcccgcaatgctcacaagctcctatagcttcccttcttcccccgtacctctcaccagcggtgtcttcggtatgtgaaaacccaattcttcaaccctacaggatccaacaggcaatcgcagctggcatcttacctttatcacccttgttcctccaacaatcatcagccctatttcagcagttaaccttggtgcatttattggcacaaatcatcagggcacatcaacttacaacaacttt

SEQ ID NO: 32150 - DNA, 169 bp, Zea mays
  Clone ID: LIB3182-015-P2-M1-F4
tctccggcctgaggattcgattattctgttcgctctcgcccaagtcatcgtctggtcgtcgcccgcagaggcgcagacgcccaaagccggaaggggcgccatggtcgcgttggatctggtgagcatggtcaaggatgtcttcttctacgtcaactttctattctggttt

SEQ ID NO: 32151 - DNA, 237 bp, Zea mays
  Clone ID: LIB3182-015-P2-M1-F7
atgcgacgtcatactttttatagggtacctaattaaattctgtctcggtacacgtgtttgtaaactcttgtccactatgctgaaatcctttcttttttattatattttttttttttttttttttttttttttttccttttttttttttttttcttttttttttttttcttttttttttttttttttttttttttttttttttttttttttattttttttttatttatttcttttttt

SEQ ID NO: 32152 - DNA, 89 bp, Zea mays
  Clone ID: LIB3182-015-P2-M1-F9
ttttccccactgaagaaactatgtgctgtagtatagccgttggctagctagctagttgagtcatttagcggcgatgtttgagtaataat

SEQ ID NO: 32153 - DNA, 351 bp, Zea mays
  Clone ID: LIB3182-015-P2-M1-G1
gcattcagaaacacaccaagcgaagcgcactagcaacaacctaacaacaatggctaccaagatattagccctccttgcgcttcttgcccttttagtgagcgcaacaaatgcgttcattattccacagtgctcacttgctcctagtgccattattccacagttcctcccaccagttacttcaatgggcttcgaacatccagccgtgcaagcctacaggctacaactagcgcttgcggcgagcgtcttacaacaaccaattgcccaattgcaacaacaatccttggcacatctaaacctacaaaccattgcaacgcaacagcaacaacagtttctgtcatcactgagccacct

SEQ ID NO: 32154 - DNA, 301 bp, Zea mays
  Clone ID: LIB3182-015-P2-M1-G11
aaacacaccaagcgaagcgcactagcaacaacctaacaacaatggctaccaagatattagccctccttgcgcttcttgcccttttagtgagcgcaacaaatgcgttcattattccacagtgctcacttgctcctagtgccattattccacagtttcttccaccagttacttcaatgggcttcgaacatccagccgtgcaagcctacaggctacaactagcgcttgcggcgagcgtctttcttcaaccaattgtccaattgtaacatcaattcttggtacatcttaacttacaaaccatttt

SEQ ID NO: 32155 - DNA, 66 bp, Zea mays
  Clone ID: LIB3182-015-P2-M1-G3
aaaaaaaaaaaaaaaaaaaaaaaaaaaaaaaaaaaaaaaaaaaaaaaaaaaaaaaaaaaaaaaaag

SEQ ID NO: 32156 - DNA, 410 bp, Zea mays
  Clone ID: LIB3182-015-P2-M1-G6
attttgagcattcagaaacacaccaagcgaagcacattagcaacaacctaacaacaatggctaccaagatattatccctccttgcgcttcttgcgctttttgcgagcgcaacaaatgcgttcattattccacaatgctcacttgctccaagttccattattacacagttcctcccaccagttacttcaatgggcttcgaacacccagctgtgcaagcctataggctacaacaagcaattgcggcgagcgtcttacaacaaccaatttcccaagtgcaacaacaatccttggcacatctaacaatacaaaccatcgcaacgcaacagcaacaacaattcctaccagcactgagccacctagccatggtgaaccctgccggctacttgcaacagcagatgcttgcatcaaac

SEQ ID NO: 32157 - DNA, 172 bp, Zea mays
  Clone ID: LIB3182-015-P2-M1-G9
tctatacgactcactatatgggaaagctggtacgtcctgcaggttacctggtccggtaaatttccgggatcgtcccacgacgtatcgttaacttattaatgctacaatatttctaatctactaatggaatctaaaattttttcgctttcttatttaatttggtctttttgca

SEQ ID NO: 32158 - DNA, 402 bp, Zea mays
  Clone ID: LIB3182-015-P2-M1-H1
ctttggtccatttggtggcacaaaacatcagggcacaacaactacaacaacttgtgctagcaaaccttgctgcatactctcagcaacatcagtttcttccattcaaccaactggctgcattgaactctgctgcttatttgcaacaacaattaccattcagccagctagttgctgcctacccccagcaatttcttccattcaaccaactagcagcattgaactctgctgcttatttacagcagcaacaactactaccattcagccagctagctgatgtgagccctgctgccttcttgacacaacaacagttgttgccgatctacctgcacgctatgtctaacgctggcacccttttacaactgcaacaattgctggcattcaaccaacttgctttgaccaact

SEQ ID NO: 32159 - DNA, 212 bp, Zea mays
  Clone ID: LIB3182-015-P2-M1-H10
gttgcaaacaaacatgatgccgatggagataccaaagaggaagatgatgcatctgatgatgaagatggtacagtttaagatgactccaacagtgttagcgatgatctatactattactttgattgtgaatttgattcttattttattgtttttttttatcttttcttttattgctgtttctttgagatttattattttattattgctttttt

SEQ ID NO: 32160 - DNA, 257 bp, Zea mays
  Clone ID: LIB3182-015-P2-M1-H11
taacaacacaatccaggctcacttacaggaaaataatgattgggttgaatggcaaacaaatgtgctggtcaaacgcaatgaagtggagaatgtttatcattgggcttgtgggcgcccgacatcgttacatgaccgtggtttggacagctatgtttatgatttttcggtacaggtttttcgatttgttattttttgttaatacttatgttctggctttctttatgttatatttatttatcataactttttcttagctc

SEQ ID NO: 32161 - DNA, 401 bp, Zea mays
  Clone ID: LIB3182-015-P2-M1-H12
cgcagctggcatcttacctttatcacccttgttcctccaacaatcatcagccctattacaacagttacctttggtgcatttattggcacaaaacatcagggcacaacaactacaacaacttgtgctagcaaaccttgctgcctactctcagcaacagcagtttcttccattcaaccaactaggttcattgaactctgcttcttatttgcaacaacaacaactaccattcagccagctacctgctgcctacccccagcaatttctttcattcaaccaactagcaagattgaactctcctgcttatttacagcagcaacaactactaccattcagtcagcttgctggtgtgagccctgatactttttgacacaaccacagttggtgccgttctaccagcacgt

SEQ ID NO: 32162 - DNA, 394 bp, Zea mays
  Clone ID: LIB3182-015-P2-M1-H2
ggagcacatagcagtgcttgctatgatgtgctcgtggatgttcctttcccgctgcagaaagagatgatggcgttccttgccaacacagagaagcacaaggacattgaggcttgcgacgaggtgatatctgcttcgatcaagaagatccatgagcaccgcaggaggagggcattcttcctgggtttcagccagtccccagtggagttcatcaatgcattgatagcttcccagagcaaggatttaaagctggtcgccggcgaggcgaatagaaacattgagaaggatagacgtgccgacttctataaccaaccatgggtcgaagacgccgttataagatacttgaaccgcaaaccagctaatgagggccccaggtgtggtgcttgtggttcttgag

SEQ ID NO: 32163 - DNA, 358 bp, Zea mays
  Clone ID: LIB3182-015-P2-M1-H4
attttcagcattcagaaacacaccaagcgaagcgcactagcaacaacctaacaacaatggctaccaagatattagccctccttgcgcttcttgcccttttagtgagcgcaacaaatgcgttcattattccacagtgctcacttgctcctagtgccattattccacagtttctcccaccagttacttcaatgggcttcgaacattcagccgtgcaagcctacaggctacaactagcgcttgcggcgagcgtcttacaacaaccaattgcccaattgcaacaacaatccttggcacatctaaacctacaaaccatcgcaacgcaacagcaacaacaggttctgccatcactgaaccacct

SEQ ID NO: 32164 - DNA, 212 bp, Zea mays
  Clone ID: LIB3182-015-P2-M1-H5
aaagcggccaggtcgcggggctgttggcggcgcagatagcgcagcaactgacggcgatgtgcggcctgcagcagccgactccatgcccctacgctgctgccggcggtgtcccccactgaagaaactatgtgctgtggtatagccgttggctagctagctatgtgagtcatctagcgcagatgattgagtgataatgagatatgcatcaccat

SEQ ID NO: 32165 - DNA, 327 bp, Zea mays
  unsure at all n locations
  Clone ID: LIB3182-016-P2-M1-A10
tcggttgatgatnannattttttatgtgaggacgtntggtannattgatgtgaccacgggattggaaagtgatgacgatgacaaaaaatntgcaacagggaaggcagaagatgcgaagtagtagcctatggttttacgattcgacatagggccacaatgatagcgaactttagaattccaagatggtattgtatattagttgatcgcatgtcatcaattcatttgttatctcccagaaaaggggttaattataaaataataattaaactaataagtattgtgagtaattgatatatacttttaatattttttataatatatatattg

SEQ ID NO: 32166 - DNA, 427 bp, Zea mays
  Clone ID: LIB3182-016-P2-M1-A11
cagaagctcaaatactgatctcactgagccagtatggctatggcaaaggcaggcgcgccgagggtctcggcggcccagctggtgactctcgggctatcactcctctgcgctgtcgccggcccggccgccgcgcagaactgcggctgccagccaaacgtatgctgcagcaagtttggctactgcggcacgaccgacgagtactgcggcgacgggtgccagtcgggcccgtgccgctcgggcggcggcggcagcagtggcggcggaggtgcgaacgtggctagcgtcgtcaccggctccttcttcaacggcatcaagagccaggccgcgagcggatgcgaggccaagaacttctacacccggagcgcgcttctgggcgccgtcaaggcggacccaggcttagcccatggcgggtcgtaagtgcagggca

SEQ ID NO: 32167 - DNA, 365 bp, Zea mays
  unsure at all n locations
  Clone ID: LIB3182-016-P2-M1-A2
taccaacataaaaagcncanttttatactaacagtgccatgcannatatggtgctgacttatgctccttgtcctttatgcaagtgctgcttcctcaaccattatctcacaatgctcacaagctcctatagcttccttacttccaccatacactttcaccaacgctgtcttcaaaatgtgaaaacccaattctttaaccctacaggatccaacaggcattcgcaccaggcatcttaccttaatcacccttgtttctacaacaaccgacagccctattacagcatttacctttgtagcatttgtcggcacaaaacattcaagcacagcaactacaacaacttgtgctaggaaacctagctgactact

SEQ ID NO: 32168 - DNA, 353 bp, Zea mays
  unsure at all n locations
  Clone ID: LIB3182-016-P2-M1-A3
gccttgttccaacccnnccnttttacattgtacttaaccctatctnggctgtgccgggccctctccttccctatcctcacccccatggacccnnnntccaagaagcgcatgcccgacgagaacggtgccgtcaccgcctctcccgccggtggtgctgccacgctgggcctcacccgctacgacgtcatccgccttctcgagccgctctcccgggaccagcttgcggacatagcggccgccgccgcgctcgtatcctccccagcgctcgacgccgtgcgcgcagccgtcgaccgtgacccggccctccgcaagctcttcgctcgggggctttgcttgggagaccacatccgact

SEQ ID NO: 32169 - DNA, 278 bp, Zea mays
  unsure at all n locations
  Clone ID: LIB3182-016-P2-M1-A4
ccgccganccggtcgaccacctcgtacattgaagtgatatgtgctgagggggagccatcggaggatgggctggcgaatgaaagctttaaataacccngctgcttcgggtgcgcttggttatcgacctgatgacgaatcgcccggccatttgagctgttacatgccaaccggtgtcaggttcagagataggtccttgtgaacacccagactgggcataggactctatcgcagttgcggaaggtcgcatggacagacttcggtcaaagtgacatgatgaa

SEQ ID NO: 32170 - DNA, 411 bp, Zea mays
  unsure at all n locations
  Clone ID: LIB3182-016-P2-M1-A7
gtgaaaacccanttctttaacggtacaggatccaacagncaatcgcaggaggcatcttacctttatcacccttgttcctccaacagccgtnagccctattacagcagttacctttggtgcatttgttggcacaaaacatcaaggcacaacaactacaacaacttgtgctaggaaaccttgctgcctactctcagcaacagcagtttcttccattcaaccaactggctgcattgaactctgctgcttatttgcaacaacaactaccattcagtcagctagctgctgcctacccccagcaatttctttcattcaaccaactggcagcattgaactctgctgcttatttacaacagcaacagctaccaccattcagccagctagctgatgtgagccctgttgccttcttgacac

SEQ ID NO: 32171 - DNA, 293 bp, Zea mays
  unsure at all n locations
  Clone ID: LIB3182-016-P2-M1-A8
gtcgaactcgattncatgcctacgacaggatcnacngtnacttaggttcgtgggcagtggctaacccattggtcgctgccttcctacagtagcaacatttgctgccatacaaccggctctctttgatgaatcctgtcttgtcgaggcagcaacccatcgttggaggtgccatgttttagattacatatgagatgtactcgataatggtgccatcataccggcatgcgtttcctagaaataatcaatatattggttgagatctatcttgatgtaaaaaaaaagatgaaatacaa

SEQ ID NO: 32172 - DNA, 440 bp, Zea mays
  unsure at all n locations
  Clone ID: LIB3182-016-P2-M1-B10
tctattgagactntcttgtatcatatatatgctcantagngnccaacattggcagccaaaatattttgcctccttatgctccttggtcnnnctgcaagtgctgctacggcgaccattttcccgcaatgctcgcaagctcctatagcttcccttcttcccccgtacctctcaccagcggtgtcttcggtatgtgaaaacccaattcttcaaccctacaggatccaacaggcaatcgcagctggcatcttacctttatcacccttgttcctccaacaatcatcagccctattacaacagttacctttggtgcatttattggcacaaaacatcatggcacaacaactacaacaacttgtgctagcaaaccttgctgcctactctcagcaacagcagtttcttccattcaaccaactaggttcattgaactctgcttcttattt

SEQ ID NO: 32173 - DNA, 281 bp, Zea mays
  Clone ID: LIB3182-016-P2-M1-B12
ctccaatcccctcgtctctcacgggccctagccttctgggaagcgcgggtcgctcaggaggacagccatggcgccggagccggaggatgatattatgaacgagaagaatccccgcccgctcgacgaggacgacatcgcgctcctcaagacctatgggcttgggccgtactctactagcattaagaaggtcgagaaggagatcaaggaaatggccaagaaaatcaatgacctttgtggtataaaggagtctgatacagggatggctccacctagccagtggg

SEQ ID NO: 32174 - DNA, 337 bp, Zea mays
  unsure at all n locations
  Clone ID: LIB3182-016-P2-M1-B2
agctcatcgactccanattggataactcgacaccatgaaggngcngatgggtggccttgctctcctggcgctcgctgcgagcgccgcctccnnnccaagcggcggctgtggctgccagacaccaccgtttcatctaccgcctccgttctatatgccgcctccgttctatctgccgccgcagcagcagccgcagccatggcaataccccactcaaccaccgcagctaagcccgtgccagcagttcggatcctgcggcgtcagcagcgtcggcagcccgatcctgggccagtgcgtcgagttcctgaagcaccaatgcattcccggcgtcgacgcccta

SEQ ID NO: 32175 - DNA, 245 bp, Zea mays
  unsure at all n locations
  Clone ID: LIB3182-016-P2-M1-B3
gagttaagtagtttgnttgnactgatggaacaacactttacgctcttgtgaagtaccatgcttggatctgttgtgctgcttctgtacaangnngctgctgttaaaatgcttgcaaattgcactgctctgctgctgaaaacaggagcagcagtagaaactaccgcaacaggagggcgtgctacctgctactgttatgtattattattattatactatattctaagtataataagacttagtttttt

SEQ ID NO: 32176 - DNA, 337 bp, Zea mays
  unsure at all n locations
  Clone ID: LIB3182-016-P2-M1-B4
cttttccaccccgccnccgaagccaccgtgccgctagccatcnccggcggcgcaaaatggccgcctccgcgcgacccctggttaccgtgagggccctggagggcgacatggccacggactccgccggtgttccgctggcggacgtcctccgcgcaccgatccgcccggacatcgttcgcttcgtccacaagctcctgtcctgcaacagccgccaaccctatgcggtgtcgcgtcgcgccggacaccagacctccgcggagtcctggggcacggggcgtgcggtatcccgtatcccccgggttccctggcggtggtacccaccgtgccggccagggag

SEQ ID NO: 32177 - DNA, 440 bp, Zea mays
  unsure at all n locations
  Clone ID: LIB3182-016-P2-M1-B5
attttgagcattcanaaacacaccaagcgaagctgcctancancgacttaacaacaatggctaccaagatattagccctccttgcgcttcttgccctttttgtgagcgcaacaaatgcgttcattattccacaatgctcacttgctcctagtgccattataccacagttcctccgaccagttacttcaatgggcttcgaacacctagctgtgcaagcctacaggctacaacaagcgcttgcggcgagcgtcttacaacaaccaattaaccaattgcaacaacaatccttggcacatctaaccatacaaaccatcgcaacacaacagcaacaacagttcctaccagcactgagccaactagatgtggtgaaccctgtcgcctacttgcaacagcaggtgcttgcatccaacccacttgctctggcaaacgtagctgcatac

SEQ ID NO: 32178 - DNA, 440 bp, Zea mays
  unsure at all n locations
  Clone ID: LIB3182-016-P2-M1-B6
gtcatcctagcaattagctcattgactggagagtggagaacnngactcggtgaaggtgctgatcgttgcccttgctctcctggcgctcnnnncgagcgccgcctccagtacaagcggcggctgtggctgccacacaccaccgtttcatctaccgcctccggtctatatgccgcctccgttctatctgccgccgcagcagcagccgcagccatggcaataccccactcaaccaccgcagctaagcccgtgccagcagttcggatcctgcggcgtctgcagcgtcggcagcccgttcctgggccagtgcgtcgagttcctgaggcaccagtgcagcccggcggcgacgccctactgctcgccacagtgccaggcgctgcagcagcagtgctgccaccagatcaagcaggtggagccgctgcaccggtaccaggcgacatacg

SEQ ID NO: 32179 - DNA, 301 bp, Zea mays
  unsure at all n locations
  Clone ID: LIB3182-016-P2-M1-B8
tcgattcttagtcntnnctaatacatgatgtgtanctangtnagggcgtcagaacaacacttgctaccaagcaattagctcctccttacgcttgtaccccttgtagtgagcgcaacagatgcacacattatttcacaccactcacttactcatatggccaacatttcacaggatctgccaccagcaactacaatgagcatcgaacatacaatcaagcaagcctacatgctacaactatcgctcgttatcagcgacacacaacaaccaactgcccatgcactacaaccatcctttgcacatc

SEQ ID NO: 32180 - DNA, 291 bp, Zea mays
  unsure at all n locations
  Clone ID: LIB3182-016-P2-M1-C1
tcggcataaaggaaagctnnctccgagacaaggaacgaaaccgtgacncagtgagcggggatggggaagcagctctgcgacatgcaccgctcgcgccnncnnncccgcatcgtcgccgccgccctcctctccgccttcgccgacgccgccgccgcgctcacggtgtacctcgtcttacgaccgctgaagccgcacgcctccgtggtgcgcgtcgccgtgtaccgcatggccacggccgccgagaactcctcggaggggcgggccccgccgccgtacacgctcgcggcgagc

SEQ ID NO: 32181 - DNA, 432 bp, Zea mays
  unsure at all n locations
  Clone ID: LIB3182-016-P2-M1-C10
tcgcagaaacacaccatgtgaagtgcagtagcatctacctgncaacaatggttgccaagatattagccctccttgcgcttcttgaaaannnagagagcgcaacaaatgcgttcattattccacagtgctcacttgctcctagtgccattattccacagttcctcccaccagttacttcaatgggcttcgaacatccagccgtgcaagcctacaggctacaactagcgcttgcggcgagcgtcttacaacaaccaattgcccaattgcaacaacaatccttggcacatctaaacctacaaaccatcgcaacgcaacagcaacaacagtttctgccatcactgagccacctagccgtggtgaaccctgtcgcctacttgcaacagcagctacttgcatccaacccacttgctctggcgaacgtagctgcatacc

SEQ ID NO: 32182 - DNA, 434 bp, Zea mays
  Clone ID: LIB3182-016-P2-M1-C11
caaacgccggcctccggccgcccgtccgtaggccataggccacccgtagggcgctaggcttccaccgccgacgcccacagaaaccgtatgcgccaccgggccaccacgagatccctgccgtgacggagaatggaggccgccgcggccgtcctccccacgctggtgccctccgggagcgcggtggtggtgctcctcgcctacctcgggtatctcgccgccgctggagccatcctcccagggaagctcgtcgacggagccctactcccggactcctctcgcctccactatcgctgcaacggtttgctctcgctcctgctgctgctgggactctcggcgttcggtgtctacatgggggtgatgtctcccacggttgtagctgacatgggactcgaacttctgtcggtgacctttatttttaggggcattgtctcttt

SEQ ID NO: 32183 - DNA, 420 bp, Zea mays
  unsure at all n locations
  Clone ID: LIB3182-016-P2-M1-C12
gcttgatgagtaccttctcactcgcagctgcatcactggctaccaagcttccaaggatgacttggctgtctacacttcgttttcgnctgctccctcgtccaagtatatcaacgtagcaaggtggtttaatcacattgatgcgctcgtgaggctgagcggaattactgcagagggccaaggtgtgaaggttgaatcctcagcagttccttcagccccaactccagatgttgctgaagcacaggccccagctgctgaggaggaggacgatgatgatgttgacctttttggtgaggagaccgaagatgagaagaaggctgctgaagagcgtgctgcagctgccaaggcttctggcaagaagaaagaatctgggaagtcatcagttttacttgatgtgaagccatgggacgatgagactgacat

SEQ ID NO: 32184 - DNA, 394 bp, Zea mays
  unsure at all n locations
  Clone ID: LIB3182-016-P2-M1-C2
tcgcaaccaagtagctctggcaaacttttctgccgactgtcagcaacnacaagggtgggccattcaaccaactgtctacattgaaccgtgctgcnnatnngcagcaacaactattaccattcagccagctagctactgcctactctcagcaacaacaacttcttccatttaaccaattggccgcactgaaccccgctgcttatttgcagcagcaaatactactaccatttagccagctagctgcagcaagccgtgcttccttcttgacacagcaacagttgctgcctttctaccagcagtttgcggctaaccccgcaacccttttacaactacaacaattgttgccctttgtccaacttgctttgacaaacccaagagcctcctaccaacaaca

SEQ ID NO: 32185 - DNA, 326 bp, Zea mays
  unsure at all n locations
  Clone ID: LIB3182-016-P2-M1-C3
tcgcaattagctcatcgtctccatattgtagaacgggtcaccanggaggagcggagcgttgcccttgctctcctggcgctcgctgcgagcgccnncttcagtacaagcggcggctgtggctgccagacaccaccgtttcatctaccgcctccgttctatatgccgcctccgttctatctgccgccgcagcagcagccgcagtcatggcaataccccactcaaccaccgcagctaagcccgtgccagcagttcggatcctgcggaaccagcagcgtcggcagtccgttcctgggccagtgcgccaagtttctggagcaccattgcag

SEQ ID NO: 32186 - DNA, 422 bp, Zea mays
  unsure at all n locations
  Clone ID: LIB3182-016-P2-M1-C4
cagaccattagctntatctactccagagcgcagaggaacccgatcgacaccatgagggtgttgctcgttgccctcgctctcctggctctcgctgcaagcgccacctccacgcatacaagcggcggctgcggctgccagccaccgccgccggttcatctaccgccgccggtgcatctgccacctccggttcacctgccacctccggtgcatctcccaccgccggtccacctgccgccgccggtccacctgccaccgccggtccatgtgccggcgccggttcatctgccgccgccaccatgccactaccctactcaaccgccccggcctcagcctcatccccagccacacccatgcccgtgccaacagccgcatccaagcccgtgccagcttcagggaacctgcggcgttggcagcaccccgat

SEQ ID NO: 32187 - DNA, 392 bp, Zea mays
  unsure at all n locations
  Clone ID: LIB3182-016-P2-M1-C5
tcgatatttataaatcnnaagcatttcgatatggagggnccaaacnnacgtatgcggtgcgtgcgataccataacatctatctatagcgtgaccttcattcacttcactgaccgcaacatacaacgtcattgactcacaaaactctctcgctactcaacttattattctacaagtacatccacctttcaccttaatgggctataaacaccaagctctgaccgactatactttacaacaagtgatcgcgctgaatgtctaataacacccaatttcccacgtggaactacattccttggctcatataacaatacacaccatcaccacgcaacattaacaacagttactaccagcactgaaccacctagccatagtgaaccctgtcacctactta

SEQ ID NO: 32188 - DNA, 411 bp, Zea mays
  unsure at all n locations
  Clone ID: LIB3182-016-P2-M1-C6
tcgcatgcaggcaggtcnncnatgaaggcaggaagacgcgaagaccgagccgtgcgggggctcgggacgggaacgggacaggaccccaaaatctcanatccttcctgcccgcccgcccgtgcccgtcgacgcgtcgttcttgccggccgcgccccacctacgccctctcctcctccagggggatcggatacgccacaggctgcgcgatggtgctgtgggtcttcggctacggctccctcatctggaaccccggcttcgacttcgacgacaaaatcctcggcttcatcaagggctacaagcgcacctttaatctcgcttgcattgaccacagaagcacaccggagcatccggcgaggacctgcacgcttgaaaccgacgacgaggccatatgctggggaattgcatattgtg

SEQ ID NO: 32189 - DNA, 428 bp, Zea mays
  unsure at all n locations
  Clone ID: LIB3182-016-P2-M1-C8
tcgctagcaacagnnanngctctttggtgtggctacattggcagccagtgtgggttgcttccttatgctccttggtctttctgcaagtgttactaccgcaaccattttcccacaatgctcacaagctcctatagcttcccttcttcccccatacctttcaccatcggcgtcttcaatgtgcgaaaacccaattgttcaaccctacaggatccaacaggcaatcgcaacaagcatcttaccattatcacccttgttcctccaacaaccgacagccctattacatcatttacctttggtccatgtggtggcacaaaacatcaaggcacaacaactacaacaacttgtgctaacaaaccttgctgcatactctcagcaacatcactttcttccattcaaccaactggcttcatttgaactcttgctgctta

SEQ ID NO: 32190 - DNA, 294 bp, Zea mays
  unsure at all n locations
  Clone ID: LIB3182-016-P2-M1-C9
tctcatcaatcannattcatattagtagtatagncactaanncaaatggggagcatcaattatctaactccaaaaaccatgaagctgtngcttgtggttcttgctttcattgctttagtatcaaacgtttcttgtacacacacaagcggctgcatctgtggtcaacaacatagccattagcagcaacatcatccacaacaacatcatccacaaaaacaacatcatcaaccaaccccacaacatcaccagcatcatcaacaccaacaacaacaaggttaaaatccacccccaaaa

SEQ ID NO: 32191 - DNA, 212 bp, Zea mays
  unsure at all n locations
  Clone ID: LIB3182-016-P2-M1-D1
tctaaaaaaaaaaaaaatnnnnaaaaaaaagagaaaagaanncaanagnngaaagaaatggaaaaaaaaaaaaaaaaaaaaaaaaaaaaaaaattttttttggggcggccgttctaaagaacccaagttaacatacccttccatccaacttaatacctttttaatagtgtcaccaaaattaaattcactgcccgccatttaaaaacgctcta

SEQ ID NO: 32192 - DNA, 318 bp, Zea mays
  unsure at all n locations
  Clone ID: LIB3182-016-P2-M1-D10
tcggcagcagcancanctagttggcaggtcagggtcttaaccccatggccatgaggatggcgcagaacatgccggccatgggtggactctaccagtaccagtaccagctgcccagctaccgcaccaacccctgtggcgtctccgctgccattccgccctactactgattcatgatatttgggaaatctcctctatccatccctctctatctatatatgtaataatgcagtaagacgacacacattatcatgtgtggtatgaccaataatatatgcatcataataaagttttggttttaaagaaaatatacatgttatt

SEQ ID NO: 32193 - DNA, 440 bp, Zea mays
  unsure at all n locations
  Clone ID: LIB3182-016-P2-M1-D11
tcgaccaactagcaacatataaagcacaatggtgtaccaacaatggcagacaaaatattttgcctccttatgctccttggtctttctgcangtgctgctacggcgaccattttcccgaaatgctcgcaagctcctatagcttcccttcttcccccgtacctctcaccagcggtgtcttcggtatgtgaaaacccaattcttcaaccctacaggatccaacaggcaatcacagctggcatcttacctttatcacccttgttcctccaacaatcatcagccctattacatcagttacctttggtgcatttattggcacaaaacatcagggcacaacaactacaacaacttgtgctagcaaaccttgctgcctactctcagcaacagcagtttcttccattcaaccaactagctgcattgaactctgcttcttatttgcaaca

SEQ ID NO: 32194 - DNA, 437 bp, Zea mays
  unsure at all n locations
  Clone ID: LIB3182-016-P2-M1-D12
atagtgaagnacactagcaacatgttagcgccaatgggagccaagatgggtgccctccttgccctccttgctctttcagcaagcgctgctacctcgacttttattccacaatgctcacaacaatacctctctccggcgacagccgtgggatttcaatacccaactatacaatcctacatggtacaagaggccatccaagcaagcatcttacggtcattagcattaaccctccaacaaccatatgctctattgcaacagccatccttagtgcatctgtatctccaaagaaccctgccgcctacgtacaacaacaacaactgctttcatctagcccgctcgctgtgggcaatgcacctacatacctgcaacaacaattgttgcaacagattgtaccagctctgactcaactagctgtggcaaaccctgttgcctacttg

SEQ ID NO: 32195 - DNA, 391 bp, Zea mays
  Clone ID: LIB3182-016-P2-M1-D2
ctagcaacatagaaagcacaatattgtgccaacaatggcagccaaaatgtgttgcttccttatgctccttggtctttctgcaagtgttgctaccgcaaccattttcccacaatgctcacaagctcctatagcttcccttcttcccccatacctctcaccagcggtgtcttcaatgtgtgaaaacccaattgttcaaccctacaggatccaacaggcaatcgcaacaggcatcttaccattatcacccttgttcctccaacaaccgtcagccctattacagcagttacctttggtccatttggtggcacaaaacatcagggcacaacaactacaacaacttgtgctagcaaaccttgctgcatactctcagcaacatcagtttctttcattc

SEQ ID NO: 32196 - DNA, 374 bp, Zea mays
  unsure at all n locations
  Clone ID: LIB3182-016-P2-M1-D5
gttcaaacaaagtcgtcagtagggtggttgcccaggggcattggtggcaaagacagggtcctttgctctggcaggggcnngacgccaggaccccgcgcaaagacagggtcctacggttcttttttttttacatgacatttgagtgacaactacatgacggagcaggcgttggggttctcgtcgctgaagatctgcggcgccatgggctgctgctggtgcaggtggtggtgcggcggcccgtataacggcggcgggtaggccggctggtaggcgtacgggtaccccggaggcggcgggtaggccggcggctggtagtaccctccagcgaacgggaaccgcgggtagtgcatgtacaggctggcggccgggtcctt

SEQ ID NO: 32197 - DNA, 309 bp, Zea mays
  unsure at all n locations
  Clone ID: LIB3182-016-P2-M1-D6
tctttttttaatcgatnngnactatttttattttatggnctgnggntgctaagtcttgggcccttcctgcgctacttgctctttttgcgaccccnacacatgcatccatcactccacaatgctcacttgctcctattatcattatttcacagttcctcccaccatatactataatggcctccttacacccatttgtgctagcccatagactacaacaagccttctcgttgaacatattacaacaaccaattgccctatttcaacaacaattcttgccacatttaacaattctaaccattttaacgcaac

SEQ ID NO: 32198 - DNA, 394 bp, Zea mays
  unsure at all n locations
  Clone ID: LIB3182-016-P2-M1-D7
tctattttcaactttcaaatacacacgaagggatnctctctngcgacgagcctaacaacaatcgctaccaanatattatccctccttgctcttnttgcccttttagtgagcgcaacaaatgcgttcattattccacagcgctcacttgctcctagtgccattattccacagatcctcccaccagttacttcaatgggcttcaaacatccacccgtgcaagcctacaagctacaactagcgcttgccgcgagcgtcttacaacaaccaattgcccaattgcaacaacaatccttggcacaatctaaacctacaaaccatcgcaacgcaacaacaacaacatgttctgccctcactgaaccacctaatccaggagaaccctgtctcctacttacaa

SEQ ID NO: 32199 - DNA, 261 bp, Zea mays
  unsure at all n locations
  Clone ID: LIB3182-016-P2-M1-D8
tcgaattgctgccattcaatcaacttgctgtgatanacgcgacagtggtctgccaacaacccatcattggtggtgccctcttttataagncnnatgacttatagttcaataatgaagatctttggatgatgttcgtggcgtcccagaaataagaaagtacatttcttaaaatattaaaaaacccactttatcaacccttacaagaatccacacgtacattcctccagcatattatcaatattaaccttgattcttctacaa

SEQ ID NO: 32200 - DNA, 436 bp, Zea mays
  Clone ID: LIB3182-016-P2-M1-E1
tcgctgggctggacccagccgcgccccgtctgcctcctgcttctctctccgcttccgcttcctgcgcctccaggctccacttctccgctcggcagtctgcactggaaggacagcatgtcggcctcggcgtcgtcaccggcggcggcggcgggcgatgagaagcaggaggcggcgcccgtcaggcgctgcaagggcgtcaacgacctcgacaaggtcgttctccgcgaggtccggggcagctccgcagaggtgtacttgtatggtgggcatgtgacatcatggaaagatgagcatggagatgaattactttttgttagcaataaggctattttcaagcctccaaaagctatacgtggaggaataccaatatgctttccgcagttctccaactttgggaatcttgaaccacatggaattgcaaggaataagacatgga

SEQ ID NO: 32201 - DNA, 442 bp, Zea mays
  unsure at all n locations
  Clone ID: LIB3182-016-P2-M1-E10
tctttttcaggaagcctcananggttcactgtagggcccgtgcangaagggcacatgaggccaagcagaagggaaggcactctggatacggcaagcgcaggggtaccagggaggctaggctccccaccaagattctgtggatgaggaggatgcgtgttctgaggcgcctgctccgcaagtaccgtgaggccaagaagattgacaagcacatgtatcatgacatgtacatgaaggtcaagggtaatatgtttaagaacaagagggtacttatggagagtatccacaagtccaaggctgagaaggccagagagaagacactttcagatcagtttgaggccaagcgtgcaaagagcaaggcaagccgtgagaggaagattgctaggagggaggaaaggctggcccagggcccaagagaaccaacagcacctgtcgcagccccagc

SEQ ID NO: 32202 - DNA, 434 bp, Zea mays
  unsure at all n locations
  Clone ID: LIB3182-016-P2-M1-E11
tcgattttgagcattcanaaacacaccgagggaagcgcactagcagcaacctggcaacaatggctaccaagatattatccctccttgcgcttcttgcgctttttgcgagcgcaacaaatgcgtccattattccacaatgctcacttgctcctagttccattattccacagttcctcccaccagttacttcaatggccttcgaacacccagctgtgcaagcctataggctacaacaagcgattgcggcgagcgtcttacaacaaccaattgcccaattgcaacaacaatccttggcacatctaacaatacaaaccatcgcaacgcaacagcaacaacagttcctaccagcactgagccacctagccatggtgaaccctgtcgcctacttgcaacagcagctgcttgcatccaacccacttgctctagcaaacgta

SEQ ID NO: 32203 - DNA, 422 bp, Zea mays
  Clone ID: LIB3182-016-P2-M1-E12
tcgcaccgaattccctgcgattcctctgcggtggcctcctcgtctgcggctaggggatcgtcggagaggaatcgcaaagagggccggctcatccgagttaaggaagccatggagcacaaggaggctgggtgccaggcccccgagggacccatcctctgcatcaataactgtggcttcttcggcagcgcggcgaccatgaacatgtgctctaagtgccacaaggagatgataacgaagcaggatcaggccaagctggctgcctcctctatcgacagcatcgtgaacggcagcgacgccgtcatggagccggttgttgctggcagcaacacggtagtagctgttgcccaagtcgagttgcaaacaatgaacgtgcagcagcccgctgatgttgccggacccagcgaggtggtggcggcgatctc

SEQ ID NO: 32204 - DNA, 418 bp, Zea mays
  Clone ID: LIB3182-016-P2-M1-E2
aggcaagtgcgatttcgatctcggagcgcgcctttttttttgttctgttgtgtatctagtagttggaggagatatgcagtttgcacttgcattggacacgaactcaggtcctcaccagataagatcttgtgagggtgatgggattgacaggttggaaaaattaagtattgggggcagaaagcaggagaaagctttgagaaataggtgctttggtggtagagttgctgcaactacacaatgtattcttacctcagatgcttgtcctgaaactcttcattctcaaacacagtcctctaggaaaaattatgctgatgcaaaccgtgtatctgctatcattttgggcggaggcactggatctcagctctttcctctgacaagcacaagagctacgcctgctgtacctgttggaggatgttac

SEQ ID NO: 32205 - DNA, 348 bp, Zea mays
  Clone ID: LIB3182-016-P2-M1-E4
ttgcccacgcgtccggccgcactgaaccccgctgcttatttgcagcagcaaatactactaccatttagccagctagctgcagcaagccgtgcttccttcttgacacagcaacagttgctgcctttctaccagcagtttgcggctaaccccgcaaccctcttacaactacaacaattgttgccctttgtccaacttgctttgacaaacccagcagcctcctaccaacaacacatcattggtggtgccctcttttagattgcttattagttgtaattcaataataaagttttttggatgatgtatgtggccaaccagaaataagaagttacatttccagattctaatgtg

SEQ ID NO: 32206 - DNA, 390 bp, Zea mays
  unsure at all n locations
  Clone ID: LIB3182-016-P2-M1-E5
tcgctcgtcttcgttcccctttcctcctgcgcaccgcgtcttctcctcaccgcgtcaaaccccagcacaaatcaaccgcccgccgcctccgctcccctcccgtcccgaatcagccgccgcggtgcccaatccggccgatcccccctcctatccgccgcagaggcggcgcctctgggcctaccccgatgtatagcaacttcaaggagcaggcgatcgagtacgtcaagcaggcggtccaggaggacaatgccggcaactacgtcaaggcgttccctctctacatgaacgcgctcgagtacttcaagacccatctcaagtacgagaagaaccccaagatcaaggaggccatcaccgccaagttcaccgagtacctccgncgcgccgaggaga

SEQ ID NO: 32207 - DNA, 425 bp, Zea mays
  unsure at all n locations
  Clone ID: LIB3182-016-P2-M1-E6
tttctcttggatttgattcanatgagacttggtcaagcattcaacgctggggagtcttccatggacaacagtggttctgagccttccaagaagaaagacagtaaatccggtgtgtcttcagcaggcgaacggctaaaagcttcgaattttcctgcaaatatattgaagattggttcatgggagtatgtctcacggtatgaaggtgatttggtggcgaagtgttactttgcaaagcataaacttgtgtgggaagttctggaaggtggccttaaaagtaagatagaaattcaatggtcagatattgctgctttgaaggcaatttgccccgaaaatggccaaggaaccttggacgtggtgttggccaggccacctcttttctttaaagagacagatccgcagccaaggaaacacacactgtggcaggc

SEQ ID NO: 32208 - DNA, 287 bp, Zea mays
  unsure at all n locations
  Clone ID: LIB3182-016-P2-M1-E8
ttcgttttgtgaaccggacagaggaagagagagagagaagtatagaacgcccgccgcggcgccgccgacgccccacccggccgagccgaaaccganactgcatcctccttcgcggcgcgccgagatgagcggcatgagcctctcccatcgtctccctcccgccgcggcggcggtggacccctactacgtgtatgcggcgcacccggacccacagcggcagggcgtgctcacgcttttccgtcgcggggctcccgacgacgtaaaagccccccagatccacaaacttt

SEQ ID NO: 32209 - DNA, 381 bp, Zea mays
  Clone ID: LIB3182-016-P2-M1-E9
tcgcaactagcaacatagaaagcacaatagtgtaccaacaatggcagccaaagtattttgcttccttatgctccttggtctttctgcaagtgttgctaccgcaaccattttcccacaatgctcacaagctcctatagcttcccttcttcccccatacctctcaccagcggtgtcttcaatgtgtgaaaacccaattgttcaaccctacaggatccaacaggcaatcgcaacaggcatcttaccattatcacccttgttcctccaacaaccgtcagccctattacagcagttacctttggtctatttggtggcacaaaacatcagggcacaacaactacaacaacttgtgctagcaaaccttgctgcatactctcagcaaca

SEQ ID NO: 32210 - DNA, 333 bp, Zea mays
  unsure at all n locations
  Clone ID: LIB3182-016-P2-M1-F1
ctctcactgactgactactgtaataccagagggcgaacaacttggggcggcgggtgaagaagagagttatgtgcattcgtgggccgggggcancagacagagatagagagccatatcaacggaccagcagccgcagctctaagacgagatgaacgactctgcctgcagcggagctaggctgactccagaggttcgtttccaaccaaccgacttctagatatgcactttatacctcaccaacaaggtgctgaacacgcgcttaacctggaccgacatcaccgaggccgacctaaacaagattgcgccatggaacctccctagcaatgccaaaat

SEQ ID NO: 32211 - DNA, 439 bp, Zea mays
  unsure at all n locations
  Clone ID: LIB3182-016-P2-M1-F10
tcgaaagcacaatantgtaccaacaatggcaggcaaaatattttgcctggttatgctccttggtctttctgcaagtgctgctacggcgaccattttcccgaaatgctcgcaagctcctatagcttcccttcttcccccgtacctctcaccagcggtgtcttcggtatgtgaaaacccaattcttcaaccctacaggatccaacaggcaatcacagctggcatcttacctttatcacccttgttcctccaacaatcatcagccctattacatcagttacctttggtgcatttattggcacaaaacatcagggcacaacaactacaacaacttgtgctagcaaaccttgctgcctactctcagcaacagcagtttcttccattcaaccaactagctgcattgaactctgcttcttatttgcaacaacaacaactaccattc

SEQ ID NO: 32212 - DNA, 433 bp, Zea mays
  unsure at all n locations
  Clone ID: LIB3182-016-P2-M1-F12
caacaagcaacatagaaagtgggatccagtntcaacaatagagcaacaatggcgaccaagatattttccctccttatgctccttgctctttctgcatgtgttgctaacgcgacaattttccctcaatgctcacaagctcctatagcttcccttcttcccccataccttccatcaatgatagcttcagtatgtgaaaacccagctcttcaaccctataggctccaacaagcaatcgcagcaagcaacatacctttatcacccttgtttcaacaactattaccattcagccagctagctactgcctactctcagcaacaacaacttcttccatttaaccaattggccgcactgaaccccgctgcttatttgcagcagcaaatactactaccatttagccagctagctgcagcaagccgtgcttccttcttgacac

SEQ ID NO: 32213 - DNA, 443 bp, Zea mays
  Clone ID: LIB3182-016-P2-M1-F2
caacaacgtctgcaacagtttatgccagcgctcagtcaactagccatggtgaaccctgtcgcctacctacaacagcaacaattgctttcatctagcccgctcgctgtgggcaatgcacctacgtacctacaacaacagttgctgcaacagattgtaccagctctgactcagctagctgtggcaaaccctactgcctacttgcaacagttgcttccattcaaccaactggctgtgtcgaactctgctgtgtacctacaacagcgacaacagttacttaatccactagcagtggctaacccattggtcgctaacttcctgcagcagcaacaattgctgccatacaaccagttctctttgatgaaccctgccttgcagcaacccatcgttggaggtgccatcttttagattacatatgagatgtactcaacatggtgccctcatac

SEQ ID NO: 32214 - DNA, 350 bp, Zea mays
  Clone ID: LIB3182-016-P2-M1-F4
cgcgcgacgcgacttattcagcaccaccggcggctttcattttttccttcgcatcttgagagagagagagagagagagcggaggaggagagcaaggagatgggcggcttcgaccagcaggtgaaggagcggaccaaggagctgaagcacctcaagaccgcggcgatgaagggcatcaaggcggccggcgagtcgtgcaagaaggcgtggagcaaggtcaggagcagcatcaagcgctaaaaggccctaggcgttgttgctctgctgctgcgtggttttctgagttgtggactgtggtagatttgcgcttgtggtttctgtttgttggatctacttatttattttggatat

SEQ ID NO: 32215 - DNA, 435 bp, Zea mays
  Clone ID: LIB3182-016-P2-M1-F6
gccacgcgtacgggcacatatctactatgctatgctctaggaagcaaggacgccaccgccatggcagccaagatgcttgcattggtcgctctcctagctctttgtgcaagcgccactagtgcgacccatattccagggcacttgccaccagtcatgccattgggtaccatgaacccatgcatgcagtactgcatgatgcaacaggggcttgccagcttgatggcgagtccgtccctgatgctgcagcaactgttggccttaccgcttcagacgatgccagtgatgatgccacagatgatgacgcctaacatgatgtcaccattgatgatgccgagcatgatgtcaccaatggtcttgccgagcatgatgtcgcacatgatgatgccacaatgtcactgcgacgccggttcgaagattatgctgcaacagcagtta

SEQ ID NO: 32216 - DNA, 333 bp, Zea mays
  unsure at all n locations
  Clone ID: LIB3182-016-P2-M1-F7
tcggcaaaagagattgaatcaaataacttggtgaatgatcatgagagagttaggcacacaatgagaacagcacaaggagctctgattgtnncttccatcctcaacatgattcttgggttcagcacgatatggggggcatatgccaaaaagttcagtccggtgataatgacccctgttgtttgtgttgttggtcttggactattccaacttggctttccccaggttgggaaatgtgtggagattgcgcttccaatgctaattcttgcggtggatgtgcaacagtatgtgccaaaatacttcatttatatccatcaaccgggtcaccttcttgtt

SEQ ID NO: 32217 - DNA, 443 bp, Zea mays
  unsure at all n locations
  Clone ID: LIB3182-016-P2-M1-G1
tcgtggacgatgagaaaaaagggaggaaatgagataaacctaggcccttgagacaatcagacttggagagagccttgtcaatgtctagaaagggcaagaaggctgcaagttcagcactgcagtcacctttgtgggtacggccgacaaattcagaagacgatcaggtacagaacgccatctttgagatatctaagctgatgtctcgaatagttcagaacagtgagtcggaaccgcaagagccttcttcaccttaacctaatccttttgctagatctcgtgaaaatctgcagcggagtaaatgcaggcattacgtcgataccgttaggtttccttatgcagtttgcagaggttcaacatatttatatatgtattaattcngtttgcgtttggaacctccaccgtgttttttgaagcaaactgcagcttgcgaagtggcaagcgtg

SEQ ID NO: 32218 - DNA, 433 bp, Zea mays
  unsure at all n locations
  Clone ID: LIB3182-016-P2-M1-G10
gaggattgaggatctcatcacaagggactatttggagcgcgacaaggacaacgccaatacgtacaaataccttgcctgattggnggntagngacaaagtccaaaacagctccgggactatgcgataccactgggatggcaatcttcctgcaatgtcgtggtgcgtccacttctaccatgatttgcagcacgttttggtgatttgccctgccacagcacgggctgctcgcattttgtacattggtcgttaaataggataagcgtgttggcctacattagatataatgatgattgatgatatgaggaataggagaggcattcaagtacttgtatgtgtcttctatgccaatgctttatctatatagctgtatcagtgttccagtcaattgatatgagatgatgcttggagtcgttttgctatatgaagtgacgga

SEQ ID NO: 32219 - DNA, 430 bp, Zea mays
  unsure at all n locations
  Clone ID: LIB3182-016-P2-M1-G11
gtcgtgtgcgnctgcaacgactggcacaccggccctctgtggtgctgcctcaagagcaactaccagtcccacggcatttacagggacccaaagaccgctttctgcatccacaacatctcctaccagggccggttcgccttctccgactacccggagctgaacctcccggagagattcaagtcgtccttcgatttcatcgacggctacgagaagcccgtggaaggccggaagatcaactggatgaaggccgggatcctcgaggccgacagggtcctcaccgtcagcccctactacgccgaggagctcatctccggcatcgccaggggctgcgagctcgacaacatcatgcgcctcaccggcatcaccggcatcgtcaacggcatggacgtcagcgagtgggaccccagcagggacaagtacatcgccgtga

SEQ ID NO: 32220 - DNA, 431 bp, Zea mays
  Clone ID: LIB3182-016-P2-M1-G12
caactagcaacatataaagcacagtagtgtaccaacaatggcagccaaaatattttgcctccttatgctccttggtatttctgcaagtgctgctacggcgaccattttcccgcaatgctcacaagctcctatagcttcccttcttcccccgtacctctcaccagcggtgtcttcggtatgtgaaaacccaattcttcaaccctacaggatccaacaggcaatcgcagctggcatcttacctttatcacccttgttcctccaacaatcatcagccctattacagcagttacctttggtgcatttattggcacaaaacatcagggcacaacaactacaacaacttgtgctagcaaaccttgctgcctactctcagcaacagcagtttcttccattcaaccaactagctgcattgaactctgcttcttatttgc

SEQ ID NO: 32221 - DNA, 82 bp, Zea mays
  unsure at all n locations
  Clone ID: LIB3182-016-P2-M1-G3
cggcccggtccggaccgcccgggtcggacccancgcgatctgctgtactagttgatacaccctgagcgcatgcgttgggggg

SEQ ID NO: 32222 - DNA, 328 bp, Zea mays
  Clone ID: LIB3182-016-P2-M1-G5
gcggccaggtcgcggggctgttggcggggcagatagcgcagcaactgacggcgatgtgcggcctgcagcagccgactccatgcccctacgctgctgccggcggtgtcccccactgaagaaactatgtgctgtagtatagccgctggctagctagctagttgagtcatttagcggcgatgattgagtaataatgtgtcacgcatcaccatgggtggcagtgtcagtgtgagcaatgacctgaatgaacaattgaaatgaaaagaaaaaagtattgttccaaattaaaaaaaaaaaaaaaaaaagttacaaaaaaaaaaaacctttacac

SEQ ID NO: 32223 - DNA, 436 bp, Zea mays
  Clone ID: LIB3182-016-P2-M1-G6
atcagcaaagcggcagtgcgtagagaggagcgtggtacagaacagcatggagatggtcatcgttctcgtcgtgtgcctggctctgtcagctgccagcgcctctgcaatgcagatgccctgcccctgcgcggggctgcagggcttgtacggcgctggcgccggcctgacgacgatgatgggcgccggcgggctgtacccctacgcggagtacctgaggcagccgcagtgcagcccgctggcggcggcgccctactacgccgggtgtgggcagacgagcgccatgtaccagccgctccggcaacagtgctgccagcagcagatgaggatgatggacgtgcagtccgtcgcgcagcaactgcagatgatgatgcagcttgagcgtgccgctgccgccagcagcagcctgtacgagccagctctgatgcagcagcagcag

SEQ ID NO: 32224 - DNA, 435 bp, Zea mays
  unsure at all n locations
  Clone ID: LIB3182-016-P2-M1-G7
tcgcccacgcgtacgccattaagctggtgcttgtggatcttgctgtggggggtgtagtatcaagtgtttcttgtacacagacaggcggttgcanctgtggtcaacaacaaagccatgagcagcaacatcatccacaacaacatcatccacaaaaacaacaacatcaaccaccaccacaacatcaccagcagcagcaacaccaacaacaacaagttcacatgcaaccacaaaaacatcagcaacaacaagaagttcatgttcaacaacaacaacaacaaccgcagcaccaacaacaacaacaacaacagcaccaacaacaacatcaatgtgaaggccaacaacaacatcaccaacaatcacaaggccatgtgcaacaacacgaacagagccatgagcaacaccaaggacagagccatgagcaacaacatcaacaac

SEQ ID NO: 32225 - DNA, 367 bp, Zea mays
  Clone ID: LIB3182-016-P2-M1-G9
attgataccaactagcaacatacgtaggggggtacactagcaacatcttagcaccaatgggagccaagatttttgccctccttgccctccttgctctttcagcaagcgctgctacctcgacttttattccacaatgctcacaacaatacctatctccggcgacagccgtgggatttcaatacccaactatacaatcctacatggtacaagaggccatccaagcaagcatattacggtcattagcattaaccctgcaacaaccatatgctctattgcaacagccatccttagtgcatctgtatctccaaagaatcgcggcacaacaactacaacaacagttgctaccaacaatcaatcaagtagttgc

SEQ ID NO: 32226 - DNA, 445 bp, Zea mays
  Clone ID: LIB3182-016-P2-M1-H1
ttttagcaacatagaaagcacaatagtgtaccaacgatggcagccaaaatattttgcctccttatgctccttggtctttctgcaagtgctgctacggcgaccattttcccgaaatgctcgcaagctcctatagcttcccttcttcccccgtacctctcaccagcggtgtcttcggtatgtgaaaacccaattcttcaaccctacaggatccaacaggcaatcacagctggcatcttacctttatcacccttgttcctccaacaatcatcagccctattacatcagttacctttggtgcatttattggcacaaaacatcagggcacaacaactacaacaacttgtgctagcaaaccttgctgcctactctcagcaacagcagtttcttccattcaaccaactagctgcattgaactctgcttcttatttgcaacaacaacaactac

SEQ ID NO: 32227 - DNA, 361 bp, Zea mays
  Clone ID: LIB3182-016-P2-M1-H10
tcgattttgagcattcataaacacacgaagggaagcgcactagcaacaacctaacaacaatggctaccaagatattatccctccttgcgcttcttgcgctttttgcgagcgcaacaaatgcgtccattattccacaatgctcacttgctcctagttccattattccacagttcctcccaccagttacttcaatggccttcgaacacccagctgtgcaagcctataggctacaacaagcgattgcggcgagcgtcttacaacaaccaattgcccaattgcaacaacaatccttggcacatctaacaatacaaaccatcgcaacgcaacagcaacaacagttcctaccagcactgagccacct

SEQ ID NO: 32228 - DNA, 361 bp, Zea mays
  Clone ID: LIB3182-016-P2-M1-H11
tcgctttgcttccggacgggtgtcgccgagggcagccgctttttaagagcccggaccgatgtcctgagattggaaagagggaagccgcaggcagcatctgcatctctcgcccacctccgctccgcctgctgctgctggtggtagggaggcggagaaggaggcccttgcgcccgcccgccggccggatcagagccgtagcaaccaccacccatggcggacgtgcacgaacctttggtgcgccgtaagaggaagaaggttttggtggactacttggtgaagttccgatggatcctcgtgatcttcgtggtccttcctatttcaactctgatctacttcaacatcttcctgggcgacatgtggt

SEQ ID NO: 32229 - DNA, 461 bp, Zea mays
  unsure at all n locations
  Clone ID: LIB3182-016-P2-M1-H2
cgtttcgatttaaagcacaaatagtgtaccaacaatggcagggcaaaatatgtttgcctggcttatgcgtccttggtctttnctgcaagtgcttgcttacggcgtaccattttcccacaantgctcacaagtctcctatagcttccctttcttcccccgtacctctcaccagcggtgtcttcggtatgtgaaaacccaattcttcaaccctataggatccaacaggcaatcgcagctggcatcttacctttatcacccttgttcctccaacaatcatcagccctattacagcagttacctttggtgcatttattggcacaaaacatcagggcacaacaactacaacaacttgtgctagcaaaccttgctgcctactctcagcaacaacagtttcttccattcaaccaactagctgcattgaactctgcttcttatttgcaacaacaacaactaccattcag

SEQ ID NO: 32230 - DNA, 393 bp, Zea mays
  Clone ID: LIB3182-016-P2-M1-H5
cggcgtcttcacaaacgccggcgcaagctgtcgcccgagcccgacagaggttcagttccccattccgcccaccgatcgaccttcacgccagtctcggtctcttccgaaggcgtcgcgcgcggttgtttgagaggagaggaggaagatgagggagtgcatctccgtccacatcgggcaggccggcatccaagtcggcaacgcgtgctgggaactttactgcctcgagcacggcatccagcctgatggccaagtgcctggagataagaccgcgggacatcacgatgatgccttcagcaccttcttcagccagactggtgctgggaagcacgttccccgtgcaatcttcgttgatctagaacccactgtgatcgatgaggtgcgcactggcacgta

SEQ ID NO: 32231 - DNA, 436 bp, Zea mays
  unsure at all n locations
  Clone ID: LIB3182-016-P2-M1-H6
tcgccaacaagcaacatanaaagtggaatcgagtagcaacaatagagcagcaggggcgaccaagatattttccctccttatgctccttgctctttctgcatgtgttgctaacgcgacaattttccctcaatgctcacaagctcctatagcttcccttcttcccccataccttccatcaatgatagcttcagtatgtgaaaacccagctcttcaaccctataggctccaacaagcaatcgcagcaagcaacatacctttatcacccttgtttcaacaatcgccagccctatctttggtgcagtcattggtacaaaccatcagggcacagcagctgcagcaactcgtgctacctgtgatcaaccaagtagctctggcaaacctttctccctactctcagcaacaacaatttcttccattcaaccaactgtctacattg

SEQ ID NO: 32232 - DNA, 380 bp, Zea mays
  Clone ID: LIB3182-016-P2-M1-H7
gttgagaaatatcaaatatgaacgaatgaatgacaagtcggacccagtggattgacagcctctgacaccgaaaaagccacagatcggatcgcggcgagcagcggccacctccggattcgggcgctcggcgtagccgcgcagtggtgtgtctgcctccctccttgtatcctcctcgaattcgagcgacggcgacggcgggaagggagatggaggcggttagaggcgatgggaggtggtgcgtggtgactggcggccgcgtgttcaccgcgaggcatctggtgaccatgctgctccactccgacgagtgacggttgcgcatggcctacctgagccccggcatcatgctctaacgcgactaactatagggtatcctgggtgct

SEQ ID NO: 32233 - DNA, 434 bp, Zea mays
  unsure at all n locations
  Clone ID: LIB3182-016-P2-M1-H8
gcaacatagaaagtggaatccagtagcagcaatagagcaacaatggagaccaagatattttccctccttatgctccttgctctttctacatgtgttgctaacgcgacaattttccctcaatgctcacaagctcctatagcttccctttttcccccataccttccatcaattatagcttcagtatgtgaaaacccagctcttcaaccatataggcttcaacaagcaatcgcagcaagcaacatacctttatcgcccttgttgtgtcaacaatcgccagccctatctttggtgcagtcattggtacaaaccatcagggcacaacagctgcagcaactcgtgctacctgtgatcaaccaagtagctctggcaaacctttctccctactctccgcaacaacaatntcttccattcaaccaactgtctacactgaaccc

SEQ ID NO: 32234 - DNA, 382 bp, Zea mays
  Clone ID: LIB3182-016-P2-M1-H9
tcgtacggacctaactaaaccctatctaagggaacggaaacaagaccatggatgcctccaagctccgcgagcttcgtgacttcttcgaggcgtgcaataagaatccttcgcttctcgccgaccccaacctctacttcttgcgggattacctccagagtttgggtgccaaaattcccgccgccgccccctctttagaaagtcccaagagatcttccatggacgacattgatgactacggtgatgacaacgacgatttggatatgagggatcccactccttagcgagacgagctcgatgaagagattgctgagtctgatcttgaactcgaaggagaaattgtacagtctgaccatgatgacccaccacaatagatgggaaattc

SEQ ID NO: 32235 - DNA, 445 bp, Zea mays
  Clone ID: LIB3182-004-P2-M1-E8.F2
aaagcggggaaaaaaaacatcccatccccttccccagccggggggaccaacccccaaaaaaaaaaaaaaaagcagatgggacttcccctggggaacacaggaccaaatcattttttaaaaccttaacgacgacgacaaacggggggcgacgaccaagccccccccaggaaaactaaactaaactggaaaggttttttaccaaccgaacaaaatttgaaaacgggggacgggatccttttacaaaaaagggagggggcactcgggcccggatgggaaaaacaaaagggggccccccacacaaagggagagggggatgtttttttaagcgaaatcaaaaaggggggggccccatcaaaccagcaggggggggagcgacccaaaccaatctgggtggttggacggacccggaaacacctaacggggaacaatcgcgggcgatggggcc

SEQ ID NO: 32236 - DNA, 658 bp, Zea mays
  unsure at all n locations
  Clone ID: LIB3182-004-P2-M1-E8.R2
ccttagctttactactccagacgcanaagacccgatcgacacctgagggtgttgctcgttgccctcgctctcctggctctcgctgcgagcgccacctccacgcatacaagcggcgagacagcgggggacggtgaagtggttcaacgacaccaagggcttcgggttcatctcccccgaggacggcagcgaagatctcttcgtgcaccagtcgtcgatcaagtcggagggcttccgctcgctcgcggagggcgaggaggtggagttttccgtctcggagggtgacgacggccgcactaaggccgtcgacgtgaccggccccgacggatccttcgtcaggggcggcggaggcggaggaggaggcggcggcggctacggctcccgcggcggtggcggatctggcggcggcggtcgcagctacggtggtagctggggcggcggccggagatccggcggcggnggcggtcccggcgcgtgctacaagtgcggcgagcccggccacatggcaagggactgccctagcgccgacggcggaggcggctatggcggaggcggctacggnggcggcggctacggaggaagaggaaggaggcggtggctgcttcaagtgcggcgagcctggccacatggccagggactgctccnagcgcggcggcggcta
